(19) United States
(12) Patent Application Publication
(10) Pub. No.: US 2003/0215805 A1
(43) Pub. Date: Nov. 20, 2003

(54) Novel genes, compositions, kits, and methods for identification, assessment prevention, and therapy of breast cancer

(75) Inventors: James Lillie, Natick, MA (US); Adam Palermo, Stanford, MA (US); Youzhen Wang, Newton, MA (US); Kathleen Steinmann, Winchester, MA (US); Josh Elias, Brookline, MA (US); Maureen Mertens, Stow, MA (US)

Correspondence Address: LAHIVE & COCKFIELD, 28 STATE STREET, BOSTON, MA, 02109, US

(73) Assignee: Millennium Pharmaceutical, Inc., Cambridge, MA (US)

(21) Appl. No.: 10/125,968

(22) Filed: Apr. 19, 2002

Related U.S. Application Data
(60) Provisional application No. 60/285,163, filed on Apr. 20, 2001.

(51) Int. Cl. C12Q 1/68; G01N 33/574; G06F 19/00; G01N 33/48; G01N 33/50

(52) U.S. Cl. 435/6; 435/7.23; 702/19

(57) ABSTRACT

The invention relates to compositions, kits, and methods for detecting, characterizing, preventing, and treating human breast cancers. A variety of marker genes are provided, wherein changes in the levels of expression of one or more of the marker genes is correlated with the presence of breast cancer.

### RELATED APPLICATIONS

[0001] The present application claims priority to U.S. provisional patent application serial No. 60/285,163, filed on Apr. 20, 2001, which is expressly incorporated by reference.

### FIELD OF THE INVENTION

[0002] The field of the invention is breast cancer, including diagnosis, characterization, management, and therapy of breast cancer.

### BACKGROUND OF THE INVENTION

[0003] The increased number of cancer cases reported in the United States, and, indeed, around the world, is a major concern. Currently there are only a handful of treatments available for specific types of cancer, and these provide no absolute guarantee of success. In order to be most effective, these treatments require not only an early detection of the malignancy, but a reliable assessment of the severity of the malignancy.

[0004] The incidence of breast cancer, a leading cause of death in women, has been gradually increasing in the United States over the last thirty years. In 1997, it was estimated that 181,000 new cases were reported in the U.S., and that 44,000 people would die of breast cancer (Parker et al, 1997, CA Cancer J. Clin. 47:5-27; Chu et al, 1996, J. Nat. Cancer Inst. 88:1571-1579). While the pathogenesis of breast cancer is unclear, transformation of normal breast epithelium to a malignant phenotype may be the result of genetic factors, especially in women under 30 (Miki et al., 1994, Science, 266:66-71). The discovery and characterization of BRCA1 and BRCA2 has recently expanded our knowledge of genetic factors which can contribute to familial breast cancer. Germ-line mutations within these two loci are associated with a 50 to 85% lifetime risk of breast and/or ovarian cancer (Casey, 1997, Curr. Opin. Oncol. 9:88-93; Marcus et al, 1996, Cancer 77:697-709). However, it is likely that other, non-genetic factors also have a significant effect on the etiology of the disease. Regardless of its origin, breast cancer morbidity and mortality increases significantly if it is not detected early in its progression. Thus, considerable effort has focused on the early detection of cellular transformation and tumor formation in breast tissue.

[0005] Currently, the principal manner of identifying breast cancer is through detection of the presence of dense tumorous tissue. This may be accomplished to varying degrees of effectiveness by direct examination of the outside of the breast, or through mammography or other X-ray imaging methods (Jatoi, 1999, Am. J. Surg. 177:518-524). The latter approach is not without considerable cost, however. Every time a mammogram is taken, the patient incurs a small risk of having a breast tumor induced by the ionizing properties of the radiation used during the test. In addition, the process is expensive and the subjective interpretations of a technician can lead to imprecision, e.g., one study showed major clinical disagreements for about one-third of a set of mammograms that were interpreted individually by a surveyed group of radiologists. Moreover, many women find that undergoing a mammogram is a painful experience. Accordingly, the National Cancer Institute has not recommended mammograms for women under fifty years of age, since this group is not as likely to develop breast cancers as are older women. It is compelling to note, however, that while only about 22% of breast cancers occur in women under fifty, data suggests that breast cancer is more aggressive in pre-menopausal women.

[0006] It would therefore be beneficial to provide specific methods and reagents for the diagnosis, staging, prognosis, monitoring, and treatment of diseases associated with breast cancer, or to indicate a predisposition to such for preventative measures.

### SUMMARY OF THE INVENTION

[0007] The invention relates to novel genes associated with breast cancer as well as methods of assessing whether a patient is afflicted with breast cancer. The methods of the present invention comprise the step of comparing the level of expression of a marker in a patient sample, wherein the marker is listed in Table 1 and the normal level of expression of the marker in a control, e.g., a sample from a patient without breast cancer. A significant difference between the level of expression of the marker in the patient sample and the normal level is an indication that the patient is afflicted with breast cancer. Preferably, a protein corresponding to the marker is a secreted protein or is predicted to correspond to a secreted protein. Alternatively, the marker can correspond to a protein having an extracellular portion, to one which is normally expressed in breast tissue at a detectable level, or both.

[0008] In one method, the marker(s) are preferably selected such that the positive predictive value of the method is at least about 10%. Also preferred are embodiments of the method wherein the marker is over- or under-expressed by at least two-fold in at least about 20% of stage 0 breast cancer patients, stage I breast cancer patients, stage IIA breast cancer patients, stage IIB breast cancer patients, stage IIIA breast cancer patients, stage IIIB breast cancer patients, stage IV breast cancer patients, grade I breast cancer patients, grade II breast cancer patients, grade III breast cancer patients, malignant breast cancer patients, ductal carcinoma breast cancer patients, and lobular carcinoma breast cancer patients.

[0009] In one embodiment of the methods of the present invention, the patient sample is a breast tissue-associated body fluid. Such fluids include, for example, blood fluids, lymph and cystic fluids, as well as nipple aspirates. In another embodiment, the sample comprises cells obtained from the patient. In another embodiment, the patient sample is in vivo.

[0010] In accordance with the methods of the present invention, the level of expression of a marker gene in a sample can be assessed, for example, by detecting the level in the sample of:

[0011] a protein encoded by the marker gene, or a polypeptide or a fragment comprising the protein (e.g. using a reagent, such as an antibody, an antibody derivative, or a single chain antibody, which binds specifically with the protein or a fragment thereof);

[0012] a metabolite which is produced directly (i.e., catalyzed) or indirectly by the protein encoded by the marker gene; and/or

[0013] a polynucleotide (e.g. an mRNA, hnRNA, cDNA) produced by or derived from the expression of the marker gene or a fragment of the polynucleotide (e.g. by contacting polynucleotides obtained or derived from the sample with a substrate having affixed thereto a nucleic acid comprising the marker gene sequence or a portion of such sequence).

[0014] The methods of the present invention are useful for further diagnosing patients having an identified breast mass or symptoms associated with breast cancer. The methods of the present invention may therefore be used to diagnose breast cancer or its precursors. The methods of the present invention can further be of particular use with patients having an enhanced risk of developing breast cancer (e.g., patients having a familial history of breast cancer and patients identified as having a mutant oncogene) in providing early detection of breast cancer. The methods of the present invention may further be of particular use in monitoring the efficacy of treatment of a breast cancer patient (e.g. the efficacy of chemotherapy).

[0015] The methods of the present invention may be performed by assessing the expression of a plurality (e.g. 2, 3, 5, or 10 or more) of breast cancer marker genes. According to a method involving a plurality of marker genes, the level of expression in a patient sample of each of a plurality of marker genes, including at least one that is selected from the marker genes listed in Table 1, is compared with the normal level of expression of each of the plurality of marker genes in samples of the same type obtained from control subjects, i.e., human subjects not afflicted with breast cancer. A significantly altered, preferably increased, level of expression in the patient sample of one or more of the marker genes, or some combination thereof, relative to those marker genes' expression levels in samples from control subjects, is an indication that the patient is afflicted with or has a higher than normal risk for developing breast cancer. The methods of the present invention may be practiced using one or more marker genes of the invention in combination with one or more known breast cancer marker genes.

[0016] In a preferred method of assessing whether a patient is afflicted with breast cancer (e.g., new detection (“screening”), detection of recurrence, reflex testing), the method comprises comparing:

[0017] a) the level of expression of one or several breast cancer marker genes, in a patient sample, wherein at least one such gene is selected from the marker genes listed in Table 1, and

[0018] b) the normal level of expression of the same marker gene(s) in a sample from a control subject having no breast cancer.

[0019] A significantly altered expression of one or several marker genes in the patient sample relative to the normal expression levels in the sample from the control subject is an indication that the patient is afflicted with breast cancer. In preferred embodiments, a significantly increased expression of one or more marker genes in the patient sample relative to the normal expression levels in the sample from the control subject is an indication that the patient is afflicted with breast cancer.

[0020] The invention further relates to a method of assessing the efficacy of a therapy for inhibiting breast cancer in a patient. This method comprises comparing:

[0021] a) expression of one or several breast cancer marker genes in a first sample obtained from the patient prior to providing at least a portion of the therapy to the patient, wherein at least one such marker gene is selected from the marker genes listed in Table 1, and

[0022] b) expression of the same marker gene(s) in a second sample obtained from the patient following provision of the portion of the therapy.

[0023] A significantly altered expression of the level of expression of one or several of the marker genes in the second sample, relative to the first sample, is an indication that the therapy is efficacious for inhibiting breast cancer in the patient. In preferred embodiments, a significantly reduced expression of one or several of the marker genes in the second sample, relative to the first sample, is an indication that the therapy is efficacious.

[0024] It will be appreciated that in this method the “therapy” may be any therapy for treating breast cancer including, but not limited to, chemotherapy, immunotherapy, gene therapy, radiation therapy and surgical removal of tissue. Thus, the methods of the invention may be used to evaluate a patient before, during and after therapy, for example, to evaluate the reduction in tumor burden.

[0025] The present invention therefore further comprises a method for monitoring the progression of breast cancer in a patient, the method comprising:

[0026] a) detecting in a patient sample at a first time point, the expression of one or several breast cancer marker genes, wherein at least one such marker gene is selected from the marker genes listed in Table 1;

[0027] b) repeating step a) with patient sample obtained at a subsequent point in time; and

[0028] c) comparing the level of expression detected in steps a) and b), and therefrom monitoring the progression of breast cancer in the patient.

[0029] A significantly altered level of expression of one or several of the marker genes in the subsequent point in time, relative to the level of expression at the first time point, is an indication that the breast cancer has progressed. In preferred embodiments, a significantly increased expression of one or several of the marker genes in the subsequent point in time, relative to the first time point, is an indication that the breast cancer has progressed. Conversely, a significantly decreased expression of one or several of the marker genes in the subsequent point in time is an indication that the breast cancer has regressed.

[0030] The present invention also includes a method for assessing the aggressiveness of breast cancer, the method comprising comparing:

[0031] a) the level of expression of one or several breast cancer marker genes in a patient sample, wherein at least one such marker gene is selected from the marker genes listed in Table 1, and

[0032] b) the level of expression of the same marker gene(s) in a sample from a control subject having breast cancer which is indolent.

[0033] A significantly altered level of expression of one or several of the marker genes in the patient sample, relative to the level in the control subject sample, is an indication that the patient is afflicted with an aggressive breast cancer. In preferred embodiments, a significantly increased expression of one or more marker genes in the patient sample, relative to the expression level in the control subject sample, is an indication that the patient is afflicted with an aggressive breast cancer.

[0034] The present invention also includes a method for assessing the indolence of breast cancer, the method comprising comparing:

[0035] a) the level of expression of one or several breast cancer marker genes in a patient sample, wherein at least one such marker gene is selected from the marker genes listed in Table 1, and

[0036] b) the level of expression of the same marker gene(s) in a sample from a control subject having an aggressive breast cancer.

[0037] A significantly altered level of expression of one or several of the marker genes in the patient sample, relative to the level in the control subject sample, is an indication that the patient is afflicted with an indolent breast cancer. In preferred embodiments, a significantly decreased expression of one or more marker genes in the patient sample, relative to the expression level in the control subject sample, is an indication that the patient is afflicted with an indolent breast cancer.

[0038] The present invention further includes a method for determining whether breast cancer has metastasized or is likely to metastasize in the future, the method comprising comparing:

[0039] a) the level of expression of one or several breast cancer marker genes in a patent sample, wherein at least one such marker gene is selected from the marker genes of Table 1 and

[0040] b) the level of expression of the same marker gene(s) in a sample from a control subject having non-metastasized breast cancer.

[0041] A significantly altered level of expression in the patient sample, relative to level of expression in the control subject sample, is an indication that the patient is afflicted with breast cancer that has metastasized or is likely to metastasize in the future. In preferred embodiments, a significantly increased expression of one or more marker genes in the patient sample, relative to the expression level in the control subject sample, is an indication that the patient is afflicted with breast cancer that has metastasized or is likely to metastasize in the future.

[0042] The present invention also includes a method for determining whether breast cancer has not metastasized or is not likely to metastasize in the future, the method comprising comparing:

[0043] a) the level of expression of one or several breast cancer marker genes in a patent sample, wherein at least one such marker gene is selected from the marker genes of Table 1 and

[0044] b) the level of expression of the same marker gene(s) in a sample from a control subject having metastasized breast cancer.

[0045] A significantly altered level of expression in the patient sample, relative to the level of expression in the control subject sample, is an indication that the patient is afflicted with breast cancer that has not metastasized or is not likely to metastasize in the future. In preferred embodiments, a significantly decreased expression of one or more marker genes in the patient sample, relative to the expression level in the control subject sample, is an indication that the patient is afflicted with breast cancer that has not metastasized or is not likely to metastasize in the future.

[0046] The invention also includes a method of selecting a composition for inhibiting breast cancer in a patient. This method comprises the steps of:

[0047] a) obtaining a sample comprising cancer cells from the patient;

[0048] b) separately maintaining aliquots of the sample in the presence of a plurality of test compositions;

[0049] c) comparing expression of one or more breast cancer marker genes, including at least one from the marker genes listed within Table 1, in each of the aliquots; and

[0050] d) selecting one of the test compositions which alters the level of expression of one or more of the marker genes in the aliquot containing that test composition, relative to other test compositions.

[0051] In preferred embodiments, the test composition which significantly reduces the expression of one or more marker genes, relative to the expression in the presence of another test composition, is selected.

[0052] In addition, the invention includes a method of inhibiting breast cancer in a patient. This method comprises the steps of:

[0053] a) obtaining a sample comprising cancer cells from the patient;

[0054] b) separately maintaining aliquots of the sample in the presence of a plurality of test compositions;

[0055] c) comparing expression of one or several breast cancer marker genes, including at least one marker genes listed within Table 1, in each of the aliquots; and

[0056] d) administering to the patient at least one of the test compositions which significantly alters the level of expression of the marker gene in the aliquot containing that test composition, relative to other test compositions.

[0057] In preferred embodiments, the test composition which significantly reduces the expression of one or more marker genes, relative to the expression in the presence of another test composition, is administered to the patient.

[0058] The invention also includes a kit for assessing whether a patient is afflicted with breast cancer or its precursors. This kit comprises reagents for assessing expression of one or several breast cancer marker genes, including at least one of the marker genes listed within Table 1.

[0059] In another aspect, the invention relates to a kit for assessing the suitability of each of a plurality of compounds for inhibiting a breast cancer in a patient. The kit comprises a reagent for assessing expression of one or several breast cancer marker genes, including at least one of the marker genes listed in Table 1, and may also comprise a plurality of compounds.

[0060] In another aspect, the invention relates to a kit for assessing the presence of breast cancer cells. This kit comprises an antibody which binds specifically with a protein encoded by one of the marker genes listed in Table 1 or a polypeptide or a protein fragment comprising the protein. The kit may also comprise a plurality of antibodies, wherein the plurality binds specifically with a protein encoded by one of the marker genes listed in Table 1, a polypeptide or a protein fragment comprising the protein.

[0061] The invention also includes a kit for assessing the presence of breast cancer cells, wherein the kit comprises a nucleic acid probe. The probe binds specifically with a transcribed polynucleotide encoded by one of the marker genes listed within Table 1. The kit may also comprise a plurality of nucleic acid probes, wherein each of the probes binds specifically with a transcribed polynucleotide encoded by several different breast cancer marker genes, including at least one of the marker genes listed within Table 1.

[0062] The invention further relates to a method of making an isolated hybridoma which produces an antibody useful for assessing whether a patient is afflicted with breast cancer. The method comprises immunizing a mammal with a composition comprising a protein encoded by a marker gene listed within Table 1, or a polypeptide or a protein fragment comprising the protein; isolating splenocytes from the immunized mammal; fusing the isolated splenocytes with an immortalized cell line to form hybridomas; and screening individual hybridomas for production of an antibody which specifically binds with the protein or parts thereof; to isolate the hybridoma. The invention also includes an antibody produced by this method.

[0063] The invention further includes a method of assessing the carcinogenic potential of a test compound. This method comprises the steps of:

[0064] a) maintaining separate aliquots of breast cells in the presence and absence of the test compound; and

[0065] b) comparing expression of one or several breast cancer marker genes, including at least one of the marker genes of Table 1 in each of the aliquots.

[0066] A significantly altered level of expression of one or more of the marker genes in the aliquot maintained in the presence of (or exposed to) the test compound, relative to the level of expression in the aliquot maintained in the absence of the test compound, is an indication that the test compound possesses breast carcinogenic potential. In preferred embodiments, a significantly increased expression of one of more of the marker genes in the aliquot maintained in the presence of (or exposed to) the test compound, relative to the level of expression in the aliquot maintained in the absence of the test compound, is an indication that the test compound possesses breast carcinogenic potential.

[0067] Additionally, the invention includes a kit for assessing the breast carcinogenic potential of a test compound. The kit comprises a reagent for assessing expression of a breast cancer marker gene of Table 1 in each of the aliquots.

[0068] The invention further relates to a method of treating a patient afflicted with breast cancer and/or inhibiting breast cancer in a patient at risk for developing breast cancer. This method comprises inhibiting expression (or overexpression) of a breast cancer marker gene listing within Table 1, which is overexpressed in breast cancer.

[0069] It will be appreciated that the methods and kits of the present invention may also include known cancer marker genes including known breast cancer marker genes. It will further be appreciated that the methods and kits may be used to identify cancers other than breast cancer.

### DETAILED DESCRIPTION OF THE INVENTION

[0070] The invention relates to newly discovered correlations between expression of certain marker genes and the cancerous state of breast cells. It has been discovered that the level of expression of individual marker genes and combinations of marker genes described herein correlates with the presence of breast cancer or a pre-malignant condition in a patient. Methods are provided for detecting the presence of breast cancer in a sample, the absence of breast cancer in a sample, the stage of a breast cancer, the metastatic potential of a breast cancer, the indolence or aggressiveness of the cancer, and other characteristics of breast cancer that are relevant to prevention, diagnosis, characterization and therapy of breast cancer in a patient.

[0071] Definitions

[0072] As used herein and the claims, each of the following terms has the meaning associated with it in this section.

[0073] The articles “a” and “an” are used herein to refer to one or to more than one (i.e. to at least one) of the grammatical object of the article. By way of example, “an element” means one element or more than one element.

[0074] The term “marker polynucleotide” is meant to include nucleotide transcript (hnRNA or mRNA) encoded by a breast cancer marker gene, preferably a marker gene listed in Table 1, or cDNA derived from the nucleotide transcript, or a segment of said transcript or cDNA.

[0075] The term “marker protein” is meant to include protein or polypeptide encoded by a breast cancer marker gene, preferably a marker gene listed in Table 1, or a polypeptide or protein fragment comprising said marker protein.

[0076] The term “gene product” is meant to include marker polynucleotide and marker protein encoded by the referenced gene.

[0077] As used herein the term “polynucleotide” is synonymous with “nucleic acid.” Further a polynucleotide “corresponds to” another (a first) polynucleotide if it is related to the first polynucleotide by any of the following relationships: the second polynucleotide comprises the first polynucleotide and the second polynucleotide encodes a gene product; the second polynucleotide is the complement of the first polynucleotide and, the second polynucleotide is 5′ or 3′ to the first polynucleotide in cDNA, RNA, genomic DNA, or fragment of any of these polynucleotides. For example, a second polynucleotide may be a fragment of a gene that includes the first and second polynucleotides. The first and second polynucleotides are related in that they are components of the gene coding for a gene product, such as a protein or antibody. However, it is not necessary that the second polynucleotide comprises or overlaps with the first polynucleotide to be encompassed within the definition of “corresponding to” as used herein. For example, the first polynucleotide may be a fragment of a 3′ untranslated region of the second polynucleotide. The first and second polynucleotide may be fragments of a gene coding for a gene product. The second polynucleotide may be an exon of the gene while the first polynucleotide may be an intron of the gene. The term “probe” refers to any molecule which is capable of selectively binding to a specifically intended target molecule, for example a marker gene of the invention. Probes can either be synthesized by one skilled in the art, or derived from appropriate biological preparations. For purposes of detection of the target molecule, probes may be specifically designed to be labeled, as described herein. Examples of molecules that can be utilized as probes include, but are not limited to, proteins, antibodies, organic monomers, RNA, DNA, and cDNA.

[0078] A “breast-associated” body fluid is a fluid which, when in the body of a patient, contacts or passes through breast cells or into which cells, nucleic acids or proteins shed from breast cells are capable of passing. Exemplary breast-associated body fluids include blood fluids, lymph, cystic fluid, urine and nipple aspirates.

[0079] The “normal” level of expression of a marker gene is the level of expression of the marker gene in breast cells or breast-associated body fluids of a subject, e.g. a human, not afflicted with breast cancer.

[0080] “Over-expression” and “under-expression” of a marker gene refer to expression of the marker gene of a patient at a greater or lesser level, respectively, than normal level of expression of the marker gene (e.g. at least two-fold greater or lesser level).

[0081] As used herein, the term “promoter/regulatory sequence” means a nucleic acid sequence which is required for expression of a gene product operably linked to the promoter/regulatory sequence. In some instances, this sequence may be the core promoter sequence and in other instances, this sequence may also include an enhancer sequence and other regulatory elements which are required for expression of the gene product. The promoter/regulatory sequence may, for example, be one which expresses the gene product in a tissue-specific manner.

[0082] A “constitutive” promoter is a nucleotide sequence which, when operably linked with a polynucleotide which encodes or specifies a gene product, causes the gene product to be produced in a living human cell under most or all physiological conditions of the cell.

[0083] An “inducible” promoter is a nucleotide sequence which, when operably linked with a polynucleotide which encodes or specifies a gene product, causes the gene product to be produced in a living human cell substantially only when an inducer which corresponds to the promoter is present in the cell.

[0084] A “tissue-specific” promoter is a nucleotide sequence which, when operably linked with a polynucleotide which encodes or specifies a gene product, causes the gene product to be produced in a living human cell substantially only if the cell is a cell of the tissue type corresponding to the promoter.

[0085] A “transcribed polynucleotide” is a polynucleotide (e.g an RNA, a cDNA, or an analog of one of an RNA or cDNA) which is complementary to or homologous with all or a portion of a mature RNA made by transcription of a gene, such as any of the marker genes of the invention, and normal post-transcriptional processing (e.g. splicing), if any, of the transcript.

[0086] “Complementary” refers to the broad concept of sequence complementarity between regions of two nucleic acid strands or between two regions of the same nucleic acid strand. It is known that an adenine residue of a first nucleic acid region is capable of forming specific hydrogen bonds (“base pairing”) with a residue of a second nucleic acid region which is antiparallel to the first region if the residue is thymine or uracil. Similarly, it is known that a cytosine residue of a first nucleic acid strand is capable of base pairing with a residue of a second nucleic acid strand which is antiparallel to the first strand if the residue is guanine. A first region of a nucleic acid is complementary to a second region of the same or a different nucleic acid if, when the two regions are arranged in an antiparallel fashion, at least one nucleotide residue of the first region is capable of base pairing with a residue of the second region. Preferably, the first region, comprises a first portion and the second region comprises a second portion, whereby, when the first and second portions are arranged in an antiparallel fashion, at least about 50%, and preferably at least about 75%, at least about 90%, or at least about 95% of the nucleotide residues of the first portion are capable of base pairing with nucleotide residues in the second portion. More preferably, all nucleotide residues of the first portion are capable of base pairing with nucleotide residues in the second portion.

[0087] “Homologous” as used herein, refers to nucleotide sequence similarity between two regions of the same nucleic acid strand or between regions of two different nucleic acid strands. Homology between two regions is expressed in terms of the proportion of nucleotide residue positions of the two regions that are occupied by the same nucleotide residue. By way of example, a region having the nucleotide sequence 5′-ATTGCC-3′ and a region having the nucleotide sequence 5′-TATGGC-3′ share 50% homology. Preferably, the first region comprises a first portion and the second region comprises a second portion, whereby, at least about 50%, and preferably at least about 75%, at least about 90%, or at least about 95% of the nucleotide residue positions of each of the portions are occupied by the same nucleotide residue. More preferably, all nucleotide residue positions of each of the portions are occupied by the same nucleotide residue.

[0088] A nucleic acid or protein is “fixed” to a substrate if it is covalently or non-covalently associated with the substrate such that the substrate can be rinsed with a fluid (e.g. standard saline citrate, pH 7.4) without a substantial fraction of the nucleic acid or protein dissociating from the substrate.

[0089] As used herein, a “naturally-occurring” nucleic acid molecule refers to an RNA or DNA molecule having a nucleotide sequence that occurs in nature.

[0090] Expression of a marker gene in a patient is “significantly” altered from the level of expression of the marker gene in a control subject if the level of expression of the marker gene in a sample from the patient differs from the level in a sample from the control subject by an amount greater than the standard error of the assay employed to assess expression, and preferably at least twice, and more preferably three, four, five or ten times that amount. Expression of a marker gene in a patient is “significantly” higher than the level of expression of the marker gene in a control subject if the level of expression of the marker gene in a sample from the patient is greater than the level in a sample from the control subject by an amount greater than the standard error of the assay employed to assess expression, and preferably at least twice, and more preferably three, four, five or ten times that amount. Alternately, expression of the marker gene in the patient can be considered “significantly” lower than the level of expression in a control subject if the level of expression in a sample from the patient is lower than the level in a sample from the control subject by an amount greater than the standard error of the assay employed to assess expression, and preferably at least twice, and more preferably three, four, five or ten times that amount.

[0091] Breast cancer is “inhibited” if at least one symptom of the cancer is alleviated, terminated, slowed, or prevented. As used herein, breast cancer is also “inhibited” if recurrence or metastasis of the cancer is reduced, slowed, delayed, or prevented.

[0092] A kit is any manufacture (e.g. a package or container) comprising at least one reagent, e.g. a probe, for specifically detecting a marker gene or peptide of the invention. The manufacture is preferably promoted, distributed, or sold as a unit for performing the methods of the present invention.

[0093] Description

[0094] The present invention is based, in part, on the identification of proteins which are secreted or otherwise released from breast cancer cells but not from normal (i.e., non-cancerous) epithelial cells. The marker genes of the invention (listed in Table 1) encode such secreted or released proteins. The presence, absence, or level of expression of one or more of these marker genes and/or their gene products in breast cells or associated fluids is correlated with the cancerous state of the tissue. In particular, the level of expression a marker gene in Table 1 is increased in breast cancer cells relative to expression in normal epithelial cells. The invention thus includes compositions, kits, and methods for assessing the cancerous state of breast cells (e.g. cells obtained from a human, cultured human cells, archived or preserved human cells and in vivo cells).

[0095] The compositions, kits, and methods of the invention have the following uses, among others:

[0096] 1) assessing whether a patient is afflicted with breast cancer;

[0097] 2) assessing the stage of breast cancer in a human patient;

[0098] 3) assessing the grade of breast cancer in a patient;

[0099] 4) assessing the benign or malignant nature of breast cancer in a patient;

[0100] 5) assessing the metastatic potential of breast cancer in a patient;

[0101] 6) assessing the histological type of neoplasm (e.g. adenocarcinoma) associated with breast cancer in a patient;

[0102] 7) assessing the indolent or aggressive nature of breast cancer in a patient;

[0103] 8) making an isolated hybridoma which produces an antibody useful for assessing whether a patient is afflicted with breast cancer;

[0104] 9) assessing the presence of breast cancer cells;

[0105] 10) assessing the efficacy of one or more test compounds for inhibiting breast cancer in a patient;

[0106] 11) assessing the efficacy of a therapy for inhibiting breast cancer in a patient;

[0107] 12) monitoring the progression of breast cancer in a patient;

[0108] 13) selecting a composition or therapy for inhibiting breast cancer in a patient;

[0109] 14) treating a patient afflicted with breast cancer;

[0110] 15) inhibiting breast cancer in a patient;

[0111] 16) assessing the breast carcinogenic potential of a test compound; and

[0112] 17) inhibiting breast cancer in a patient at risk for developing breast cancer.

[0113] The invention thus includes a method of assessing whether a patient is afflicted with breast cancer which includes assessing whether the patient has pre-metastasized breast cancer. This method comprises comparing the level of expression of a breast cancer marker gene in a patient sample and the normal level of expression of the marker gene in a control sample, e.g., a sample from a subject having no breast cancer. A significant difference between the level of expression of the marker gene in the patient sample and the normal level is an indication that the patient is afflicted with breast cancer. The breast cancer marker gene is selected from the group consisting of the marker genes listed within Table 1. In particular, the level of expression of the marker genes in Table 1 is increased in breast cancer cells relative to expression in normal breast cells. Although one or more marker genes listed within Table 1 or their encoded proteins may have been described by others, the significance of the level of expression of these marker genes with regard to the cancerous state of breast cells has not previously been recognized.

[0114] Any marker gene or combination of marker genes listed within Table 1, as well as any known breast cancer marker genes in combination with the marker genes set forth within Table 1, may be used in the compositions, kits, and methods of the present invention. In general, it is preferable to use marker genes for which the difference between the level of expression of the marker gene in breast cancer cells or breast-associated body fluids and the level of expression of the same marker gene in normal breast cells or breast-associated body fluids is as great as possible. Although this difference can be as small as the limit of detection of the method for assessing expression of the marker gene, it is preferred that the difference be at least greater than the standard error of the assessment method, and preferably a difference of at least 2-, 3-, 4-, 5-, 6-, 7-, 8-, 9-, 10-, 15-, 20-, 25-, 100-, 500-, 1000-fold or greater.

[0115] It is recognized that certain markers correspond to proteins which are secreted from breast cells (i.e. one or both of normal and cancerous cells) to the extracellular space surrounding the cells. These markers are preferably used in certain embodiments of the compositions, kits, and methods of the invention, owing to the fact that the protein corresponding to each of these markers can be detected in an breast-associated body fluid sample, which may be more easily collected from a human patient than a tissue biopsy sample. In addition, preferred in vivo techniques for detection of a protein corresponding to a marker of the invention include introducing into a subject a labeled antibody directed against the protein. For example, the antibody can be labeled with a radioactive marker whose presence and location in a subject can be detected by standard imaging techniques.

[0116] Although not every marker corresponding to a secreted protein is indicated as such herein, it is a simple matter for the skilled artisan to determine whether any particular marker corresponds to a secreted protein. In order to make this determination, the protein corresponding to a marker is expressed in a test cell (e.g. a cell of a breast cell line), extracellular fluid is collected, and the presence or absence of the protein in the extracellular fluid is assessed (e.g. using a labeled antibody which binds specifically with the protein).

[0117] The following is an example of a method which can be used to detect secretion of a protein corresponding to a marker of the invention. About 8×10⁵ 293T cells are incubated at 37° C. in wells containing growth medium (Dulbecco's modified Eagle's medium {DMEM} supplemented with 10% fetal bovine serum) under a 5% (v/v) CO₂, 95% air atmosphere to about 60-70% confluence. The cells are then transfected using a standard transfection mixture comprising 2 micrograms of DNA comprising an expression vector encoding the protein and 10 microliters of LipofectAMINE™ (GIBCO/BRL Catalog no. 18342-012) per well. The transfection mixture is maintained for about 5 hours, and then replaced with fresh growth medium and maintained in an air atmosphere. Each well is gently rinsed twice with DMEM which does not contain methionine or cysteine (DMEM-MC; ICN Catalog no. 16-424-54). About 1 milliliter of DMEM-MC and about 50 microcuries of Trans-³⁵S™ reagent (ICN Catalog no. 51006) are added to each well. The wells are maintained under the 5% CO₂ atmosphere described above and incubated at 37° C. for a selected period. Following incubation, 150 microliters of conditioned medium is removed and centrifuged to remove floating cells and debris. The presence of the protein in the supernatant is an indication that the protein is secreted.

[0118] It will be appreciated that patient samples containing breast cells may be used in the methods of the present invention. In these embodiments, the level of expression of the marker gene can be assessed by assessing the amount (e.g. absolute amount or concentration) of a marker gene product (e.g., protein and RNA transcript encoded by the marker gene and fragments of the protein and RNA transcript) in a sample of breast-associated body fluid. Examples of breast-associated body fluids include blood fluids (e.g. whole blood, blood serum, blood having platelets removed therefrom, etc.), lymph, ascitic fluid, cystic fluid, urine and nipple aspirates. The breast-associated fluid sample can, of course, be subjected to a variety of well-known post-collection preparative and storage techniques (e.g. fixation, storage, freezing, lysis, homogenization, DNA or RNA extraction, ultrafiltration, concentration, evaporation, centrifugation, etc.) prior to assessing the amount of the marker gene product in the sample.

[0119] Preferred in vivo techniques for detection of a protein encoded by marker gene of the invention include introducing into a subject an antibody that specifically binds the protein, or a polypeptide or protein fragment comprising the protein. In certain embodiments, the antibody can be labeled with a radioactive molecule whose presence and location in a subject can be detected by standard imaging techniques.

[0120] Expression of a marker gene of the invention may be assessed by any of a wide variety of well known methods for detecting expression of a transcribed molecule or protein. Non-limiting examples of such methods include immunological methods for detection of secreted, cell-surface, cytoplasmic, or nuclear proteins, protein purification methods, protein function or activity assays, nucleic acid hybridization methods, nucleic acid reverse transcription methods, and nucleic acid amplification methods. Such method may also include physical methods such as liquid and gas chromatography, mass spectroscopy, and nuclear magnetic resonance.

[0121] In a preferred embodiment, expression of a marker gene is assessed using an antibody (e.g. a radio-labeled, chromophore-labeled, fluorophore-labeled, or enzyme-labeled antibody), an antibody derivative (e.g. an antibody conjugated with a substrate or with the protein or ligand of a protein-ligand pair {e.g. biotin-streptavidin}), or an antibody fragment (e.g. a single-chain antibody, an isolated antibody hypervariable domain, etc.) which binds specifically with a protein encoded by the marker gene or a polypeptide or a protein fragment comprising the protein, wherein the protein may have undergone none, all or a portion of its normal post-translational modification and/or proteolysis during the course of its secretion or release from breast cells, cancerous or otherwise.

[0122] In another preferred embodiment, expression of a marker gene is assessed by preparing mRNA/cDNA (i.e. a transcribed polynucleotide) from cells in a patient sample, and by hybridizing the mRNA/cDNA with a reference polynucleotide which comprises the marker gene sequence or its complement, or a fragment of said sequence or complement. cDNA can, optionally, be amplified using any of a variety of polymerase chain reaction methods prior to hybridization with the reference polynucleotide. Expression of one or more marker genes can likewise be detected using quantitative PCR to assess the level of RNA transcripts encoded by the marker gene(s).

[0123] In a related embodiment, a mixture of transcribed polynucleotides obtained from the sample is contacted with a substrate having fixed thereto a polynucleotide complementary to or homologous with at least a portion (e.g. at least 7, 10, 15, 20, 25, 30, 40, 50, 100, 500, or more nucleotide residues) of a RNA transcript encoded by a marker gene of the invention. If polynucleotides complementary to or homologous with a RNA transcript encoded by the marker gene of the invention are differentially detectable on the substrate (e.g. detectable using radioactivity, different chromophores or fluorophores), are fixed to different selected positions, then the levels of expression of a plurality of marker genes can be assessed simultaneously using a single substrate (e.g. a “gene chip” microarray of polynucleotides fixed at selected positions). When a method of assessing marker gene expression is used which involves hybridization of one nucleic acid with another, it is preferred that the hybridization be performed under stringent hybridization conditions.

[0124] Because the compositions, kits, and methods of the invention rely on detection of a difference in expression levels of one or more marker genes of the invention, it is preferable that the level of expression of the marker gene is significantly greater than the minimum detection limit of the method used to assess expression in at least one of normal breast cells and cancerous breast cells.

[0125] It is understood that by routine screening of additional patient samples for the expression levels of one or more of the marker genes of the invention, it will be realized that certain of the marker genes are over- or underexpressed in cancers of various types, including specific breast cancers, as well as other cancers such as ovarian cancers. For example, it will be confirmed that some of the marker genes of the invention are over-expressed in most (i.e. 50% or more) or substantially all (i.e. 80% or more) of breast cancer. Furthermore, it will be confirmed that certain of the markers of the invention are associated with breast cancer of various stages (i.e. stage 0, I, II, II, and IV breast cancers, as well as subclassifications IIA, IIB, IIIA, and IIIB, using the FIGO Stage Grouping system for primary carcinoma of the breast; (see Breast, In: American Joint Committee on Cancer: AJCC Cancer Staging Manual. Lippincott-Raven Publishers, 5th ed., 1997, pp. 171-180), of various histologic subtypes (e.g. serous, mucinous, endometroid, and clear cell subtypes, as well as subclassifications and alternate classifications adenocarcinoma, papillary adenocarcinoma, papillary cystadenocarcinoma, surface papillary carcinoma, malignant adenofibroma, cystadenofibroma, adenocarcinoma, cystadenocarcinoma, adenoacanthoma, endometrioid stromal sarcoma, mesodermal (Müillerian) mixed tumor, mesonephroid tumor, malignant carcinoma, Brenner tumor, mixed epithelial tumor, and undifferentiated carcinoma, using the WHO/FIGO system for classification of malignant breast tumors; Scully, Atlas of Tumor Pathology, 3d series, Washington D.C.), and various grades (i.e. grade I {well differentiated}, grade II {moderately well differentiated}, and grade III {poorly differentiated from surrounding normal tissue})).

[0126] It will thus be appreciated that as a greater number of patient samples are assessed for expression of the marker genes of the invention and the outcomes of the individual patients from whom the samples were obtained are correlated, it will also be confirmed that altered expression of certain of the marker genes of the invention are strongly correlated with malignant cancers and that altered expression of other marker genes of the invention are strongly correlated with benign tumors. The compositions, kits, and methods of the invention are thus useful for characterizing one or more of the stage, grade, histological type, metastatic potential, indolent vs. aggressive phenotype and benign/malignant nature of breast cancer in patients. In addition, these compositions, kits, and methods can be used to detect and differentiate lobular and ductal carcinoma breast cancers.

[0127] When the compositions, kits, and methods of the invention are used for characterizing one or more of the stage, grade, histological type, metastatic potential, indolent vs. aggressive phenotype and benign/malignant nature of breast cancer in a patient, it is preferred that the marker gene or panel of marker genes of the invention, whose expression level is assessed, is selected such that a positive result is obtained in at least about 20%, and preferably at least about 40%, 60%, or 80%, and more preferably in substantially all patients afflicted with a breast cancer of the corresponding stage, grade, histological type, metastatic potential, indolent vs. aggressive phenotype or benign/malignant nature. Preferably, the marker gene or panel of marker genes of the invention is selected such that a positive predictive value (PPV) of greater than about 10% is obtained for the general population.

[0128] When a plurality of marker genes of the invention are used in the methods of the invention, the level of expression of each marker gene in a patient sample can be compared with the normal level of expression of each of the plurality of marker genes in non-cancerous samples of the same type, either in a single reaction mixture (i.e. using reagents, such as different fluorescent probes, for each marker gene or a mixture of similiarly labeled probes to access expression level of a plurality of marker genes whose probes are fixed to a single substrate at different positions) or in individual reaction mixtures corresponding to one or more of the marker genes. In one embodiment, a significantly enhanced level of expression of more than one of the plurality of marker genes in the sample, relative to the corresponding normal levels, is an indication that the patient is afflicted with breast cancer. When the expression level of a plurality of marker genes is assessed, it is preferred that the expression level of 2, 3, 4, 5, 8, 10, 12, 15, 20, 30, or 40 or more individual marker genes is assessed.

[0129] In order to maximize the sensitivity of the compositions, kits, and methods of the invention (i.e. by interference attributable to cells of non-breast origin in a patient sample), it is preferable that the marker gene of the invention whose expression level is examined therein be a marker gene which is tissue specific, e.g., normally not expressed in non-breast tissue.

[0130] There are only a small number of marker genes whose expression are known to be associated with breast cancers (e.g. BRCA1 and BRCA2). These marker genes are not, of course, included among the marker genes of the invention, although they may be used together with one or more marker genes of the invention in a panel of marker genes, for example. It is well known that certain types of genes, such as oncogenes, tumor suppressor genes, growth factor-like genes, protease-like genes, and protein kinase-like genes are often involved with development of cancers of various types. Thus, among the marker genes of the invention, use of those which encode proteins which resemble known secreted proteins such as growth factors, proteases and protease inhibitors are preferred.

[0131] Known oncogenes and tumor suppressor genes include, for example, abl, abr, akt2, apc, bcl2 α, bcl2β, bcl3, bcr, brca1, brca2, cbl, ccnd1, cdc42, cdk4, crk-II, csflr/fms, dbl, dcc, dpc4/smad4, e-cad, e2f/rbap, egfr/erbb-1, elk1, elk3, eph, erg, ets1, ets2, fer, fgr/src2, flil/ergb2, fos, fps/fes, fra1, fra2, fyn, hck, hek, her2/erbb-2/neu, her3/erbb-3, her4/erbb-4, hras1, hst2, hstf1, igfbp2, ink4a, ink4b, int2/fgf3, jun, junb, jund, kip2, kit, kras2a, kras2b, lck, lyn, mas, max, mcc, mdm2, met, mlh1, mmp10, mos, msh2, msh3, msh6, myb, myba, mybb, myc, mycl1, mycn, nf1, nf2, nme2, nras, p53, pdgfb, phb, pim1, pms1, pms2, ptc, pten, raf1, rap1a, rb1, rel, ret, ros1, ski, src1, tal1, tgfbr2, tgfb3, tgfbr3, thra1, thrb, tiam1, timp3, tjp1, tp53, trk, vav, vhl, vil2, waf1, wnt1, wnt2, wt1, and yes1 (Hesketh, 1997, In: The Oncogene and Tumour Suppressor Gene Facts Book, 2nd Ed., Academic Press; Fishel et al., 1994, Science 266:1403-1405).

[0132] Known growth factors include platelet-derived growth factor alpha, platelet-derived growth factor beta (simian sarcoma viral {v-sis) oncogene homolog), thrombopoietin (myeloproliferative leukemia virus oncogene ligand, megakaryocyte growth and development factor), erythropoietin, B cell growth factor, macrophage stimulating factor 1 (hepatocyte growth factor-like protein), hepatocyte growth factor (hepapoietin A), insulin-like growth factor 1 (somatomedia C), hepatoma-derived growth factor, amphiregulin (schwannoma-derived growth factor), bone morphogenetic proteins 1, 2, 3, 3 beta, and 4, bone morphogenetic protein 7 (osteogenic protein 1), bone morphogenetic protein 8 (osteogenic protein 2), connective tissue growth factor, connective tissue activation peptide 3, epidermal growth factor (EGF), teratocarcinoma-derived growth factor 1, endothelin, endothelin 2, endothelin 3, stromal cell-derived factor 1, vascular endothelial growth factor (VEGF), VEGF-B, VEGF-C, placental growth factor (vascular endothelial growth factor-related protein), transforming growth factor alpha, transforming growth factor beta 1 and its precursors, transforming growth factor beta 2 and its precursors, fibroblast growth factor 1 (acidic), fibroblast growth factor 2 (basic), fibroblast growth factor 5 and its precursors, fibroblast growth factor 6 and its precursors, fibroblast growth factor 7 (keratinocyte growth factor), fibroblast growth factor 8 (androgen-induced), fibroblast growth factor 9 (glia-activating factor), pleiotrophin (heparin binding growth factor 8, neurite growth-promoting factor 1), brain-derived neurotrophic factor, and recombinant glial growth factor 2.

[0133] Known proteases include interleukin-1 beta convertase and its precursors, Mch6 and its precursors, Mch2 isoform alpha, Mch4, Cpp32 isoform alpha, Lice2 gamma cysteine protease, Ich-1S, Ich-1L, Ich-2 and its precursors, TY protease, matrix metalloproteinase 1 (interstitial collagenase), matrix metalloproteinase 2 (gelatinase A, 72kD gelatinase, 72kD type IV collagenase), matrix metalloproteinase 7 (matrilysin), matrix metalloproteinase 8 (neutrophil collagenase), matrix metalloproteinase 12 (macrophage elastase), matrix metalloproteinase 13 (collagenase 3), metallopeptidase 1, cysteine-rich metalloprotease (disintegrin) and its precursors, subtilisin-like protease Pc8 and its precursors, chymotrypsin, snake venom-like protease, cathepsin 1, cathepsin D (lysosomal aspartyl protease), stromelysin, aminopeptidase N, plasminogen, tissue plasminogen activator, plasminogen activator inhibitor type II, and urokinase-type plasminogen activator.

[0134] It is recognized that the compositions, kits, and methods of the invention will be of particular utility to patients having an enhanced risk of developing breast cancer and their medical advisors. Patients recognized as having an enhanced risk of developing breast cancer include, for example, patients having a familial history of breast cancer, patients identified as having a mutant oncogene (i.e. at least one allele), and patients determined through any other established medical criteria to be at risk for cancer or other malignancy.

[0135] The level of expression of a marker gene in normal (i.e. non-cancerous) human breast tissue can be assessed in a variety of ways. In one embodiment, this normal level of expression is assessed by assessing the level of expression of the marker gene in a portion of breast cells which appears to be non-cancerous and by comparing this normal level of expression with the level of expression in a portion of the breast cells which is suspected of being cancerous. For example, when mammography or another medical procedure reveals the presence of a lump in the patient's breast, the normal level of expression of a marker gene may be assessed using a non-affected portion of the breast and this normal level of expression may be compared with the level of expression of the same marker gene in an affected portion (i. e. the lump) of the breast. Alternately, and particularly as further information becomes available as a result of routine performance of the methods described herein, population-average values for normal expression of the marker genes of the invention may be used. In other embodiments, the ‘normal’ level of expression of a marker gene may be determined by assessing expression of the marker gene in a patient sample obtained from a non-cancer-afflicted patient, from a patient sample obtained from a patient before the suspected onset of breast cancer in the patient, from archived patient samples, and the like.

[0136] The invention includes compositions, kits, and methods for assessing the presence of breast cancer cells in a sample (e.g an archived tissue sample or a sample obtained from a patient). These compositions, kits, and methods are substantially the same as those described above, except that, where necessary, the compositions, kits, and methods are adapted for use with samples other than patient samples. For example, when the sample to be used is a parafinized, archived human tissue sample, it can be necessary to adjust the ratio of compounds in the compositions of the invention, in the kits of the invention, or the methods used to assess levels of marker gene expression in the sample. Such methods are well known in the art and within the skill of the ordinary artisan.

[0137] The invention includes a kit for assessing the presence of breast cancer cells (e.g. in a sample such as a patient sample). The kit comprises a plurality of reagents, each of which is capable of binding specifically with a protein or nucleic acid encoded by a marker gene of the invention. Suitable reagents for binding with a protein encoded by a marker gene of the invention include antibodies, antibody derivatives, antibody fragments, and the like. Additional reagents for specifically binding with a protein encoded by a marker gene include any natural ligands of the protein and derivatives of such ligands. Suitable reagents for binding with a nucleic acid encoded by a marker gene (e.g. an hnRNA, a spliced mRNA, a cDNA corresponding to the mRNA, or the like) include complementary nucleic acids. For example, the nucleic acid reagents may include oligonucleotides (labeled or non-labeled) fixed to a substrate, labeled oligonucleotides not bound with a substrate, pairs of PCR primers, molecular beacon probes, and the like.

[0138] The kit of the invention may optionally comprise additional components useful for performing the methods of the invention. By way of example, the kit may comprise fluids (e.g. SSC buffer) suitable for binding an antibody with a protein with which it specifically binds or, for annealing complementary nucleic acids one or more sample compartments, instructional material which describes performance of a method of the invention, a sample of normal breast cells, a sample of breast cancer cells, and the like.

[0139] The invention also includes a method of making an isolated hybridoma which produces an antibody useful for assessing whether a patient is afflicted with breast cancer. In this method, a composition comprising a protein encoded by a marker gene or a polypeptide or protein fragment of the protein is used to immunize a vertebrate, preferably a mammal such as a mouse, rat, rabbit, or sheep. The vertebrate may optionally (and preferably) be immunized at least one additional time with the composition, so that the vertebrate exhibits a robust immune response to the protein or parts thereof. Splenocytes are isolated from the immunized vertebrate and fused with an immortalized cell line to form hybridomas, using any of a variety of methods well known in the art. Hybridomas formed in this manner are then screened using standard methods to identify one or more hybridomas which produce an antibody which specifically binds with the protein or part thereof. The invention also includes hybridomas made by this method and antibodies made using such hybridomas. An antibody of the invention may also be used as a therapeutic agent for treating cancers, particular breast cancers.

[0140] The invention also includes a method of assessing the efficacy of a test compound for inhibiting breast cancer cells. As described above, differences in the level of expression of the marker genes of the invention correlate with the cancerous state of breast cells. Although it is recognized that changes in the levels of expression of certain of the marker genes of the invention likely result from the cancerous state of breast cells, it is likewise recognized that changes in the levels of expression of other of the marker genes of the invention induce, maintain, and promote the cancerous state of those cells. Thus, compounds which inhibit breast cancer in a patient will cause the level of expression of one or more of the marker genes of the invention to change to a level nearer the normal level of expression for that marker gene (i.e. the level of expression for the marker gene in non-cancerous breast cells).

[0141] This method thus comprises comparing expression of a marker gene in a first breast cell sample and maintained in the presence of the test compound and expression of the marker gene in a second breast cell sample and maintained in the absence of the test compound. A significantly altered level of expression of a marker gene listed within Table 1 is an indication that the test compound inhibits breast cancer. The breast cell samples may, for example, be aliquots of a single sample of normal breast cells obtained from a patient, pooled samples of normal breast cells obtained from a patient, cells of a normal breast cell line, aliquots of a single sample of breast cancer cells obtained from a patient, pooled samples of breast cancer cells obtained from a patient, cells of a breast cancer cell line, or the like. In one embodiment, the samples are breast cancer cells obtained from a patient and a plurality of compounds known to be effective for inhibiting various breast cancers are tested in order to identify the compound which is likely to best inhibit the breast cancer in the patient.

[0142] This method may likewise be used to assess the efficacy of a therapy for inhibiting breast cancer in a patient. In this method, the level of expression of one or more marker genes of the invention in a pair of samples (one subjected to the therapy, the other not subjected to the therapy) is assessed. As with the method of assessing the efficacy of test compounds, if the therapy induces a significant alteration in the level of expression of a marker gene listed within Table 1 then the therapy is efficacious for inhibiting breast cancer. As above, if samples from a selected patient are used in this method, then alternative therapies can be assessed in vitro in order to select a therapy most likely to be efficacious for inhibiting breast cancer in the patient.

[0143] As described herein, breast cancer in patients is associated with an altered level of expression of one or more marker genes listed within Table 1. While, as discussed above, some of these changes in expression level result from occurrence of the breast cancer, others of these changes induce, maintain, and promote the cancerous state of breast cancer cells. Thus, breast cancer characterized by an altered level of expression of one or more marker genes listed within Table 1 can be controlled or suppressed by altering expression of those marker genes.

[0144] Expression of a marker gene listed within Table 1 can be inhibited in a number of ways generally known in the art. For example, an antisense oligonucleotide can be provided to the breast cancer cells in order to inhibit transcription, translation, or both, of the marker gene(s). Alternately, a polynucleotide encoding an antibody, an antibody derivative, or an antibody fragment, and operably linked with an appropriate promoter/regulator region, can be provided to the cell in order to generate intracellular antibodies which will inhibit the function or activity of the protein encoded by the marker gene(s). Using the methods described herein, a variety of molecules, particularly including molecules sufficiently small that they are able to cross the cell membrane, can be screened in order to identify molecules which inhibit expression of the marker gene(s). The compound so identified can be provided to the patient in order to inhibit expression of the marker gene(s) in the breast cancer cells of the patient.

[0145] Expression of a marker gene listed within Table 1 can be enhanced in a number of ways generally known in the art. For example, a gene construct comprising the coding region of the marker gene operably linked with an appropriate promoter/regulator region can be provided to breast cancer cells of the patient in order to induce enhanced expression of the protein (and mRNA) encoded by the marker gene. Expression of the protein can be enhanced by providing the protein (e.g. directly or by way of the bloodstream or another breast-associated fluid) to breast cancer cells in the patient.

[0146] As described above, the cancerous state of human breast cells is correlated with changes in the levels of expression of the marker genes of the invention. Thus, compounds which alter expression of one or more of the marker genes listed in within Table 1 can induce breast cell carcinogenesis. The invention thus includes a method for assessing the human breast cell carcinogenic potential of a test compound. This method comprises maintaining separate aliquots of human breast cells in the presence and absence of the test compound. Expression of a marker gene of the invention in each of the aliquots is compared. A significant alteration in the level of expression of a marker gene listed within Table 1 in the aliquot maintained in the presence of the test compound (relative to the aliquot maintained in the absence of the test compound) is an indication that the test compound possesses human breast cell carcinogenic potential. The relative carcinogenic potentials of various test compounds can be assessed by comparing the degree of enhancement or inhibition of the level of expression of the relevant marker genes, by comparing the number of marker genes for which the level of expression is enhanced or inhibited, or by comparing both.

[0147] Various aspects of the invention are described in further detail in the following subsections.

[0148] I. Isolated Nucleic Acid Molecules

[0149] One aspect of the invention pertains to isolated nucleic acid molecules that correspond to a marker gene of the invention. Such nucleic acid molecules comprise sequences of RNA transcripts encoded by the marker gene or portions of such transcripts. Isolated nucleic acids of the invention also include nucleic acid molecules sufficient for use as hybridization probes to identify of RNA transcripts encoded by the marker gene or portions of such transcripts, and fragments of such nucleic acid molecules, e.g., those suitable for use as PCR primers for the amplification or mutation of nucleic acid molecules. As used herein, the term “nucleic acid molecule” is intended to include DNA molecules (e.g., cDNA or genomic DNA) and RNA molecules (e.g., mRNA) and analogs of the DNA or RNA generated using nucleotide analogs. The nucleic acid molecule can be single-stranded or double-stranded, but preferably is double-stranded DNA.

[0150] The invention also encompasses polynucleotides which differ from that of the polynucleotides described herein, but which produce the same phenotypic effect, such as an allelic variant. These altered, but phenotypically equivalent polynucleotides are referred to as “equivalent nucleic acids.” This invention also encompasses polynucleotides characterized by changes in non-coding regions that do not alter the polypeptide produced therefrom when compared to the polynucleotide herein. This invention further encompasses polynucleotides, which hybridize to the polynucleotides of the subject invention under conditions of moderate or high stringency. Alternatively, the polynucleotides are at least 85%, or at least 90%, or more preferably, greater or equal to 95% identical as determined by a sequence alignment program when run under default parameters.

[0151] An “isolated” nucleic acid molecule is one which is separated from other nucleic acid molecules which are present in the natural source of the nucleic acid molecule. Preferably, an “isolated” nucleic acid molecule comprises a protein-coding sequence and is free of sequences which naturally flank the coding sequence in the genomic DNA of the organism from which the nucleic acid is derived. For example, in various embodiments, the isolated nucleic acid molecule can contain less than about 5 kB, 4 kB, 3 kB, 2 kB, 1 kB, 0.5 kB or 0.1 kB of nucleotide sequences which naturally flank the nucleic acid molecule in genomic DNA of the cell from which the nucleic acid is derived. Moreover, an “isolated” nucleic acid molecule, such as a cDNA molecule, can be substantially free of other cellular material, or culture medium when produced by recombinant techniques, or substantially free of chemical precursors or other chemicals when chemically synthesized.

[0152] A nucleic acid molecule of the present invention, e.g., a nucleotide transcript encoded by a marker gene listed in Table 1, can be isolated using standard molecular biology techniques. Nucleic acid molecule of the present invention also encompass the marker genes of the invention, which can be isolated using standard hybridization and cloning techniques (e.g., as described in Sambrook et al., ed., Molecular Cloning. A Laboratory Manual, 2nd ed., Cold Spring Harbor Laboratory Press, Cold Spring Harbor, N.Y., 1989).

[0153] A process for identifying a larger fragment or the full-length coding sequence of a marker gene of the present invention is thus also provided. Any conventional recombinant DNA techniques applicable for isolating polynucleotides may be employed. One such method involves the 5′-RACE-PCR technique, in which the poly-A mRNA that contains the coding sequence of particular interest is first reverse transcribed with a 3′-primer comprising a sequence disclosed herein. The newly synthesized cDNA strand is then tagged with an anchor primer with a known sequence, which preferably contains a convenient cloning restriction site attached at the 5′end. The tagged cDNA is then amplified with the 3′-primer (or a nested primer sharing sequence homology to the internal sequences of the coding region) and the 5′-anchor primer. The amplification may be conducted under conditions of various levels of stringency to optimize the amplification specificity. 5′-RACE-PCR can be readily performed using commercial kits (available from, e.g., BRL Life Technologies Inc., Clontech) according to the manufacturer's instructions.

[0154] Isolating the complete coding sequence of a gene can also be carried out in a hybridization assay using a suitable probe. The probe preferably comprises at least 10 nucleotides, and more preferably exhibits sequence homology to the polynucleotides of the marker genes of the present invention. Other high throughput screens for cDNAs, such as those involving gene chip technology, can also be employed in obtaining the complete cDNA sequence.

[0155] In addition, databases exist that reduce the complexity of ESTs by assembling contiguous EST sequences into tentative genes. For example, TIGR has assembled human ESTs into a database called THC for tentative human consensus sequences. The THC database allows for a more definitive assignment compared to ESTs alone. Software programs exist (TIGR assembler and TIGEM EST assembly machine and contig assembly program (see Huang, X., 1996, Genomes 33:21-23)) that allow for assembling ESTs into contiguous sequences from any organism.

[0156] Alternatively, mRNA from a sample preparation is used to construct cDNA library in the ZAP Express vector following the procedure described in Velculescu et al., 1997, Science 270:484. The ZAP Express cDNA synthesis kit (Stratagene) is used accordingly to the manufacturer's protocol. Plates containing 250 to 2000 plaques are hybridized as described in Rupert et aL, 1988, Mol. Cell. Bio. 8:3104 to oligonucleotide probes with the same conditions previously described for standard probes except that the hybridization temperature is reduced to a room temperature. Washes are performed in 6× standard-saline-citrate 0.1% SDS for 30 minutes at room temperature. The probes are labeled with ³²P-ATP trough use of T4 polynucleotide kinase.

[0157] A partial cDNA (3′ fragment) can be isolated by 3′ directed PCR reaction. This procedure is a modification of the protocol described in Polyak et al., 1997, Nature 389:300. Briefly, the procedure uses SAGE tags in PCR reaction such that the resultant PCR product contains the SAGE tag of interest as well as additional cDNA, the length of which is defined by the position of the tag with respect to the 3′ end of the cDNA. The cDNA product derived from such a transcript driven PCR reaction can be used for many applications.

[0158] RNA from a source to express the cDNA corresponding to a given tag is first converted to double-stranded cDNA using any standard cDNA protocol. Similar conditions used to generate cDNA for SAGE library construction can be employed except that a modified oligo-dT primer is used to derive the first strand synthesis. For example, the oligonucleotide of composition 5′-B-TCC GGC GCG CCG TTT TCC CAG TCA CGA(30)-3′, contains a poly-T stretch at the 3′ end for hybridization and priming from poly-A tails, an M13 priming site for use in subsequent PCR steps, a 5′ Biotin label (B) for capture to strepavidin-coated magnetic beads, and an AscI restriction endonuclease site for releasing the cDNA from the strepavidin-coated magnetic beads. Theoretically, any sufficiently-sized DNA region capable of hybridizing to a PCR primer can be used as well as any other 8 base pair recognizing endonuclease.

[0159] cDNA constructed utilizing this or similar modified oligo-dT primer is then processed as described in U.S. Pat. No. 5,695,937 up until adapter ligation where only one adapter is ligated to the cDNA pool. After adapter ligation, the cDNA is released from the streptavidin-coated magnetic beads and is then used as a template for cDNA amplification.

[0160] Various PCR protocols can be employed using PCR priming sites within the 3′ modified oligo-dT primer and the SAGE tag. The SAGE tag-derived PCR primer employed can be of varying length dictated by 5′ extension of the tag into the adaptor sequence. cDNA products are now available for a variety of applications.

[0161] This technique can be further modified by: (1) altering the length and/or content of the modified oligo-dT primer; (2) ligating adaptors other than that previously employed within the SAGE protocol; (3) performing PCR from template retained on the streptavidin-coated magnetic beads; and (4) priming first strand cDNA synthesis with non-oligo-dT based primers.

[0162] Gene trapper technology can also be used. The reagents and manufacturer's instructions for this technology are commercially available from Life Technologies, Inc., Gaithsburg, Md. Briefly, a complex population of single-stranded phagemid DNA containing directional cDNA inserts is enriched for the target sequence by hybridization in solution to a biotinylated oligonucleotide probe complementary to the target sequence. The hybrids are captured on streptavidin-coated paramagnetic beads. A magnet retrieves the paramagnetic beads from the solution, leaving nonhybridized single-stranded DNAs behind. Subsequently, the captured single-stranded DNA target is released from the biotinylated oligonucleotide. After release, the cDNA clone is further enriched by using a nonbiotinylated target oligonucleotide to specifically prime conversion of the single-stranded DNA. Following transformation and plating, typically 20% to 100% of the colones represent the cDNA clone of interest. To identify the desired cDNA clone, the colones may be screened by colony hybridization using the ³²P-labeled oligonucleotide, or alternatively by DNA sequencing and alignment of all sequences obtained from numerous clones to determine a consensus sequence.

[0163] A nucleic acid molecule of the invention can be amplified using cDNA, mRNA, or genomic DNA as a template and appropriate oligonucleotide primers according to standard PCR amplification techniques. The nucleic acid so amplified can be cloned into an appropriate vector and characterized by DNA sequence analysis. Furthermore, oligonucleotides corresponding to all or a portion of a nucleic acid molecule of the invention can be prepared by standard synthetic techniques, e.g., using an automated DNA synthesizer.

[0164] In another preferred embodiment, an isolated nucleic acid molecule of the invention comprises a nucleotide sequence of a RNA transcript encoded by a marker gene of the invention or a complement of said sequence. A nucleic acid molecule which is complementary to a given nucleotide sequence is one which is sufficiently complementary to the given nucleotide sequence that it can hybridize to the given nucleotide sequence thereby forming a stable duplex.

[0165] Moreover, a nucleic acid molecule of the invention can comprise only a portion of the nucleotide sequence (RNA or cDNA) of a RNA transcript encoded by a marker gene of the invention or a complement of said sequence. Such nucleic acids can be used, for example, as a probe or primer. The probe/primer typically is used as one or more substantially purified oligonucleotides. The oligonucleotide typically comprises a region of nucleotide sequence that hybridizes under stringent conditions to at least about 7, preferably about 15, more preferably about 25, 50, 75, 100, 125, 150, 175, 200, 250, 300, 350, or 400 or more consecutive nucleotides of a nucleic acid of the invention.

[0166] Probes based on the sequence of a nucleic acid molecule of the invention can be used to detect transcripts or genomic sequences of one or more marker genes of the invention. The probe comprises a label group attached thereto, e.g., a radioisotope, a fluorescent compound, an enzyme, or an enzyme co-factor. Such probes can be used as part of a diagnostic test kit for identifying cells or tissues which mis-express the protein, such as by measuring levels of a nucleic acid molecule encoding the protein in a sample of cells from a subject, e.g., detecting mRNA levels or determining whether a gene encoding the protein has been mutated or deleted.

[0167] The invention further encompasses nucleic acid molecules that differ, due to degeneracy of the genetic code, from the nucleotide sequence of nucleic acids encoding a protein which corresponds to a marker gene of the invention, and thus encode the same protein.

[0168] In addition to the nucleotide sequences described in the GenBank and IMAGE Consortium database records described herein, and in Table 1, it will be appreciated by those skilled in the art that DNA sequence polymorphisms that lead to changes in the amino acid sequence can exist within a population (e.g., the human population). Such genetic polymorphisms can exist among individuals within a population due to natural allelic variation. An allele is one of a group of genes which occur alternatively at a given genetic locus. In addition, it will be appreciated that DNA polymorphisms that affect RNA expression levels can also exist that may affect the overall expression level of that gene (e.g., by affecting regulation or degradation).

[0169] As used herein, the phrase “allelic variant” refers to a nucleotide sequence which occurs at a given locus or to a polypeptide encoded by the nucleotide sequence.

[0170] As used herein, the terms “gene” and “recombinant gene” refer to nucleic acid molecules comprising an open reading frame encoding a polypeptide by a marker gene of the invention. Such natural allelic variations can typically result in 0.1-0.5% variance in the nucleotide sequence of a given gene. Alternative alleles can be identified by sequencing the gene of interest in a number of different individuals. This can be readily carried out by using hybridization probes to identify the same genetic locus in a variety of individuals. Any and all such nucleotide variations and resulting amino acid polymorphisms or variations that are the result of natural allelic variation and that do not alter the functional activity are intended to be within the scope of the invention.

[0171] In another embodiment, an isolated nucleic acid molecule of the invention is at least 7, 15, 20, 25, 30, 40, 60, 80, 100, 150, 200, 250, 300, 350, 400, 450, 550, 650, 700, 800, 900, 1000, 1200, 1400, 1600, 1800, 2000, 2200, 2400, 2600, 2800, 3000, 3500, 4000, 4500, or more nucleotides in length and hybridizes under stringent conditions to a RNA transcript of a marker gene of the invention or a portion of said transcript or a cDNA corresponding to said transcript or portion thereof. As used herein, the term “hybridizes under stringent conditions” is intended to describe conditions for hybridization and washing under which nucleotide sequences at least 75% (80%, 85%, preferably 90%) identical to each other typically remain hybridized to each other. Such stringent conditions are known to those skilled in the art and can be found in sections 6.3.1-6.3.6 of Current Protocols in Molecular Biology, John Wiley & Sons, N.Y. (1989). A preferred, non-limiting example of stringent hybridization conditions for annealing two single-stranded DNA each of which is at least about 100 bases in length and/or for annealing a single-stranded DNA and a single-stranded RNA each of which is at least about 100 bases in length, are hybridization in 6× sodium chloride/sodium citrate (SSC) at about 45° C., followed by one or more washes in 0.2×SSC, 0.1% SDS at 50-65° C. Further preferred hybridization conditions are taught in Lockhart, et al., Nature Biotechnology, Volume 14, 1996 August:1675-1680; Breslauer, et al., Proc. Natl. Acad. Sci. USA, Volume 83, 1986 June: 3746-3750; Van Ness, et al., Nucleic Acids Research, Volume 19, No. 19, 1991 September: 5143-5151; McGraw, et al., BioTechniques, Volume 8, No. 6 1990: 674-678; and Milner, et al., Nature Biotechnology, Volume 15, 1997 June: 537-541, all expressly incorporated by reference.

[0172] In addition to naturally-occurring allelic variants of a nucleic acid molecule of the invention that can exist in the population, the skilled artisan will further appreciate that sequence changes can be introduced by mutation thereby leading to changes in the amino acid sequence of the encoded protein, without altering the biological activity of the protein encoded thereby. For example, one can make nucleotide substitutions leading to amino acid substitutions at “non-essential” amino acid residues. A “non-essential” amino acid residue is a residue that can be altered from the wild-type sequence without altering the biological activity, whereas an “essential” amino acid residue is required for biological activity. For example, amino acid residues that are not conserved or only semi-conserved among homologs of various species may be non-essential for activity and thus would be likely targets for alteration. Alternatively, amino acid residues that are conserved among the homologs of various species (e.g., murine and human) may be essential for activity and thus would not be likely targets for alteration.

[0173] Accordingly, another aspect of the invention pertains to nucleic acid molecules encoding a polypeptide of the invention that contain changes in amino acid residues that are not essential for activity. Such polypeptides differ in amino acid sequence from the naturally-occurring proteins encoded by the marker genes of the invention, yet retain biological activity. In one embodiment, such a protein has an amino acid sequence that is at least about 40% identical, 50%, 60%, 70%, 80%, 90%, 95%, or 98% identical to the amino acid sequence of one of the proteins encoded by the marker genes of the invention.

[0174] An isolated nucleic acid molecule encoding a variant protein can be created by introducing one or more nucleotide substitutions, additions or deletions into the nucleotide sequence of nucleic acids of the invention, such that one or more amino acid residue substitutions, additions, or deletions are introduced into the encoded protein. Mutations can be introduced by standard techniques, such as site-directed mutagenesis and PCR-mediated mutagenesis. Preferably, conservative amino acid substitutions are made at one or more predicted non-essential amino acid residues. A “conservative amino acid substitution” is one in which the amino acid residue is replaced with an amino acid residue having a similar side chain. Families of amino acid residues having similar side chains have been defined in the art. These families include amino acids with basic side chains (e.g., lysine, arginine, histidine), acidic side chains (e.g., aspartic acid, glutamic acid), uncharged polar side chains (e.g., glycine, asparagine, glutamine, serine, threonine, tyrosine, cysteine), non-polar side chains (e.g., alanine, valine, leucine, isoleucine, proline, phenylalanine, methionine, tryptophan), beta-branched side chains (e.g., threonine, valine, isoleucine) and aromatic side chains (e.g., tyrosine, phenylalanine, tryptophan, histidine). Alternatively, mutations can be introduced randomly along all or part of the coding sequence, such as by saturation mutagenesis, and the resultant mutants can be screened for biological activity to identify mutants that retain activity. Following mutagenesis, the encoded protein can be expressed recombinantly and the activity of the protein can be determined.

[0175] The present invention encompasses antisense nucleic acid molecules, i.e., molecules which are complementary to a sense nucleic acid of the invention, e.g., complementary to the coding strand of a double-stranded cDNA molecule corresponding to a marker gene of the invention or complementary to an mRNA sequence corresponding to a marker gene of the invention. Accordingly, an antisense nucleic acid of the invention can hydrogen bond to (i.e. anneal with) a sense nucleic acid of the invention. The antisense nucleic acid can be complementary to an entire coding strand, or to only a portion thereof, e.g., all or part of the protein coding region (or open reading frame). An antisense nucleic acid molecule can also be antisense to all or part of a non-coding region of the coding strand of a nucleotide sequence encoding a polypeptide of the invention. The non-coding regions (“5′ and 3′ untranslated regions”) are the 5′ and 3′ sequences which flank the coding region and are not translated into amino acids.

[0176] An antisense oligonucleotide can be, for example, about 5, 10, 15, 20, 25, 30, 35, 40, 45, or 50 or more nucleotides in length. An antisense nucleic acid of the invention can be constructed using chemical synthesis and enzymatic ligation reactions using procedures known in the art. For example, an antisense nucleic acid (e.g., an antisense oligonucleotide) can be chemically synthesized using naturally occurring nucleotides or variously modified nucleotides designed to increase the biological stability of the molecules or to increase the physical stability of the duplex formed between the antisense and sense nucleic acids, e.g., phosphorothioate derivatives and acridine substituted nucleotides can be used. Examples of modified nucleotides which can be used to generate the antisense nucleic acid include 5-fluorouracil, 5-bromouracil, 5-chlorouracil, 5-iodouracil, hypoxanthine, xanthine, 4-acetylcytosine, 5-(carboxyhydroxylmethyl) uracil, 5-carboxymethylaminomethyl-2-thiouridine, 5-carboxymethylaminomethyluracil, dihydrouracil, beta-D-galactosylqueosine, inosine, N6-isopentenyladenine, 1-methylguanine, 1-methylinosine, 2,2-dimethylguanine, 2-methyladenine, 2-methylguanine, 3-methylcytosine, 5-methylcytosine, N6-adenine, 7-methylguanine, 5-methylaminomethyluracil, 5-methoxyaminomethyl-2-thiouracil, beta-D-mannosylqueosine, 5′-methoxycarboxymethyluracil, 5-methoxyuracil, 2-methylthio-N6-isopentenyladenine, uracil-5-oxyacetic acid (v), wybutoxosine, pseudouracil, queosine, 2-thiocytosine, 5-methyl-2-thiouracil, 2-thiouracil, 4-thiouracil, 5-methyluracil, uracil-5-oxyacetic acid methylester, uracil-5-oxyacetic acid (v), 5-methyl-2-thiouracil, 3-(3-amino-3-N-2-carboxypropyl) uracil, (acp3)w, and 2,6-diaminopurine. Alternatively, the antisense nucleic acid can be produced biologically using an expression vector into which a nucleic acid has been sub-cloned in an antisense orientation (i.e., RNA transcribed from the inserted nucleic acid will be of an antisense orientation to a target nucleic acid of interest, described further in the following subsection).

[0177] The antisense nucleic acid molecules of the invention are typically administered to a subject or generated in situ such that they hybridize with or bind to cellular mRNA and/or genomic DNA encoding a polypeptide corresponding to a selected marker gene of the invention to thereby inhibit expression of the marker gene, e.g., by inhibiting transcription and/or translation. The hybridization can be by conventional nucleotide complementarity to form a stable duplex, or, for example, in the case of an antisense nucleic acid molecule which binds to DNA duplexes, through specific interactions in the major groove of the double helix. Examples of a route of administration of antisense nucleic acid molecules of the invention includes direct injection at a tissue site or infusion of the antisense nucleic acid into a breast-associated body fluid. Alternatively, antisense nucleic acid molecules can be modified to target selected cells and then administered systemically. For example, for systemic administration, antisense molecules can be modified such that they specifically bind to receptors or antigens expressed on a selected cell surface, e.g., by linking the antisense nucleic acid molecules to peptides or antibodies which bind to cell surface receptors or antigens. The antisense nucleic acid molecules can also be delivered to cells using the vectors described herein. To achieve sufficient intracellular concentrations of the antisense molecules, vector constructs in which the antisense nucleic acid molecule is placed under the control of a strong pol II or pol III promoter are preferred.

[0178] An antisense nucleic acid molecule of the invention can be an α-anomeric nucleic acid molecule. An α-anomeric nucleic acid molecule forms specific double-stranded hybrids with complementary RNA in which, contrary to the usual α-units, the strands run parallel to each other (Gaultier et al., 1987, Nucleic Acids Res. 15:6625-6641). The antisense nucleic acid molecule can also comprise a 2′-o-methylribonucleotide (Inoue et al., 1987, Nucleic Acids Res. 15:6131-6148) or a chimeric RNA-DNA analogue (Inoue et al., 1987, FEBS Lett. 215:327-330).

[0179] The invention also encompasses ribozymes. Ribozymes are catalytic RNA molecules with ribonuclease activity which are capable of cleaving a single-stranded nucleic acid, such as an mRNA, to which they have a complementary region. Thus, ribozymes (e.g., hammerhead ribozymes as described in Haselhoff and Gerlach, 1988, Nature 334:585-591) can be used to catalytically cleave mRNA transcripts to thereby inhibit translation of the protein encoded by the mRNA. A ribozyme having specificity for a nucleic acid molecule encoding by a marker gene of the invention can be designed based upon the nucleotide sequence of a cDNA corresponding to the marker gene. For example, a derivative of a Teirahymena L-19 IVS RNA can be constructed in which the nucleotide sequence of the active site is complementary to the nucleotide sequence to be cleaved (see Cech et al. U.S. Pat. No. 4,987,071; and Cech et al. U.S. Pat. No. 5,116,742). Alternatively, an mRNA encoding a polypeptide of the invention can be used to select a catalytic RNA having a specific ribonuclease activity from a pool of RNA molecules (see, e.g., Bartel and Szostak, 1993, Science 261:1411-1418).

[0180] The invention also encompasses nucleic acid molecules which form triple helical structures. For example, expression of a polypeptide of the invention can be inhibited by targeting nucleotide sequences complementary to the regulatory region of the gene encoding the polypeptide (e.g., the promoter and/or enhancer) to form triple helical structures that prevent transcription of the gene in target cells. See generally Helene (1991) Anticancer Drug Des. 6(6):569-84; Helene (1992) Ann. N.Y. Acad. Sci. 660:27-36; and Maher (1992) Bioassays 14(12):807-15.

[0181] In various embodiments, the nucleic acid molecules of the invention can be modified at the base moiety, sugar moiety or phosphate backbone to improve, e.g., the stability, hybridization, or solubility of the molecule. For example, the deoxyribose phosphate backbone of the nucleic acids can be modified to generate peptide nucleic acids (see Hyrup et al., 1996, Bioorganic & Medicinal Chemistry 4(1): 5-23). As used herein, the terms “peptide nucleic acids” or “PNAs” refer to nucleic acid mimics, e.g., DNA mimics, in which the deoxyribose phosphate backbone is replaced by a pseudopeptide backbone and only the four natural bases are retained. The neutral backbone of PNAs has been shown to allow for specific hybridization to DNA and RNA under conditions of low ionic strength. The synthesis of PNA oligomers can be performed using standard solid phase peptide synthesis protocols as described in Hyrup et al. (1996), supra; Perry-O'Keefe et al. (1996) Proc. Natl. Acad Sci. USA 93:14670-675.

[0182] PNAs can be used in therapeutic and diagnostic applications. For example, PNAs can be used as antisense or anti-gene agents for sequence-specific modulation of gene expression by, e.g., inducing transcription or translation arrest or inhibiting replication. PNAs can also be used, e.g., in the analysis of single base pair mutations in a gene by, e.g., PNA directed PCR clamping; as artificial restriction enzymes when used in combination with other enzymes, e.g., S1 nucleases (Hyrup (1996), supra; or as probes or primers for DNA sequence and hybridization (Hyrup, 1996, supra; Perry-O'Keefe et al., 1996, Proc. Natl. Acad Sci. USA 93:14670-675).

[0183] In another embodiment, PNAs can be modified, e.g., to enhance their stability or cellular uptake, by attaching lipophilic or other helper groups to PNA, by the formation of PNA-DNA chimeras, or by the use of liposomes or other techniques of drug delivery known in the art. For example, PNA-DNA chimeras can be generated which can combine the advantageous properties of PNA and DNA. Such chimeras allow DNA recognition enzymes, e.g., RNASE H and DNA polymerases, to interact with the DNA portion while the PNA portion would provide high binding affinity and specificity. PNA-DNA chimeras can be linked using linkers of appropriate lengths selected in terms of base stacking, number of bonds between the bases, and orientation (Hyrup, 1996, supra). The synthesis of PNA-DNA chimeras can be performed as described in Hyrup (1996), supra, and Finn et al. (1996) Nucleic Acids Res. 24(17):3357-63. For example, a DNA chain can be synthesized on a solid support using standard phosphoramidite coupling chemistry and modified nucleoside analogs. Compounds such as 5′-(4-methoxytrityl)amino-5′-deoxy-thymidine phosphoramidite can be used as a link between the PNA and the 5′ end of DNA (Mag et al., 1989, Nucleic Acids Res. 17:5973-88). PNA monomers are then coupled in a step-wise manner to produce a chimeric molecule with a 5′ PNA segment and a 3′ DNA segment (Finn et al., 1996, Nucleic Acids Res. 24(17):3357-63). Alternatively, chimeric molecules can be synthesized with a 5′ DNA segment and a 3′ PNA segment (Peterser et al., 1975, Bioorganic Med. Chem. Lett. 5:1119-11124).

[0184] In other embodiments, the oligonucleotide can include other appended groups such as peptides (e.g., for targeting host cell receptors in vivo), or agents facilitating transport across the cell membrane (see, e.g., Letsinger et al., 1989, Proc. Natl. Acad Sci. USA 86:6553-6556; Lemaitre et al., 1987, Proc. Natl. Acad. Sci. USA 84:648-652; PCT Publication No. WO 88/09810) or the blood-brain barrier (see, e.g., PCT Publication No. WO 89/10134). In addition, oligonucleotides can be modified with hybridization-triggered cleavage agents (see, e.g., Krol et al., 1988, Bio/Techniques 6:958-976) or intercalating agents (see, e.g., Zon, 1988, Pharm. Res. 5:539-549). To this end, the oligonucleotide can be conjugated to another molecule, e.g., a peptide, hybridization triggered cross-linking agent, transport agent, hybridization-triggered cleavage agent, etc.

[0185] The invention also includes molecular beacon nucleic acids having at least one region which is complementary to a nucleic acid of the invention, such that the molecular beacon is useful for quantitating the presence of the nucleic acid of the invention in a sample. A “molecular beacon” nucleic acid is a nucleic acid comprising a pair of complementary regions and having a fluorophore and a fluorescent quencher associated therewith. The fluorophore and quencher are associated with different portions of the nucleic acid in such an orientation that when the complementary regions are annealed with one another, fluorescence of the fluorophore is quenched by the quencher. When the complementary regions of the nucleic acid are not annealed with one another, fluorescence of the fluorophore is quenched to a lesser degree. Molecular beacon nucleic acids are described, for example, in U.S. Pat. No. 5,876,930.

[0186] II. Isolated Proteins and Antibodies

[0187] One aspect of the invention pertains to isolated proteins encoded by individual marker genes of the invention, and biologically active portions thereof, as well as polypeptide fragments suitable for use as immunogens to raise antibodies directed against a polypeptide encoded by a marker gene of the invention. In one embodiment, the native polypeptide encoded by a marker gene can be isolated from cells or tissue sources by an appropriate purification scheme using standard protein purification techniques. In another embodiment, polypeptides encoded by a marker gene of the invention are produced by recombinant DNA techniques. Alternative to recombinant expression, a polypeptide encoded by a marker gene of the invention can be synthesized chemically using standard peptide synthesis techniques.

[0188] An “isolated” or “purified” protein or biologically active portion thereof is substantially free of cellular material or other contaminating proteins from the cell or tissue source from which the protein is derived, or substantially free of chemical precursors or other chemicals when chemically synthesized. The language “substantially free of cellular material” includes preparations of protein in which the protein is separated from cellular components of the cells from which it is isolated or recombinantly produced. Thus, protein that is substantially free of cellular material includes preparations of protein having less than about 30%, 20%, 10%, or 5% (by dry weight) of heterologous protein (also referred to herein as a “contaminating protein”). When the protein or biologically active portion thereof is recombinantly produced, it is also preferably substantially free of culture medium, i.e., culture medium represents less than about 20%, 10%, or 5% of the volume of the protein preparation. When the protein is produced by chemical synthesis, it is preferably substantially free of chemical precursors or other chemicals, i.e., it is separated from chemical precursors or other chemicals which are involved in the synthesis of the protein. Accordingly such preparations of the protein have less than about 30%, 20%, 10%, 5% (by dry weight) of chemical precursors or compounds other than the polypeptide of interest.

[0189] Biologically active portions of a polypeptide encoded by a marker gene of the invention include polypeptides comprising amino acid sequences sufficiently identical to or derived from the amino acid sequence of the protein encoded by the marker gene (e.g., the amino acid sequence listed in the GenBank and IMAGE Consortium database records described herein), which include fewer amino acids than the full length protein, and exhibit at least one activity of the corresponding full-length protein. Typically, biologically active portions comprise a domain or motif with at least one activity of the corresponding protein. A biologically active portion of a protein of the invention can be a polypeptide which is, for example, 10, 25, 50, 100 or more amino acids in length. Moreover, other biologically active portions, in which other regions of the protein are deleted, can be prepared by recombinant techniques and evaluated for one or more of the functional activities of the native form of a polypeptide of the invention.

[0190] Preferred polypeptides have the amino acid sequence listed in the NCBI Protein Database records described herein. Other useful proteins are substantially identical (e.g., at least about 40%, preferably 50%, 60%, 70%, 80%, 90%, 95%, or 99%) to one of these sequences and retain the functional activity of the protein of the corresponding naturally-occurring protein yet differ in amino acid sequence due to natural allelic variation or mutagenesis.

[0191] To determine the percent identity of two amino acid sequences or of two nucleic acids, the sequences are aligned for optimal comparison purposes (e.g., gaps can be introduced in the sequence of a first amino acid or nucleic acid sequence for optimal alignment with a second amino or nucleic acid sequence). The amino acid residues or nucleotides at corresponding amino acid positions or nucleotide positions are then compared. When a position in the first sequence is occupied by the same amino acid residue or nucleotide as the corresponding position in the second sequence, then the molecules are identical at that position. The percent identity between the two sequences is a function of the number of identical positions shared by the sequences (i.e., % identity=# of identical positions/total # of positions (e.g., overlapping positions)×100). In one embodiment the two sequences are the same length.

[0192] The determination of percent identity between two sequences can be accomplished using a mathematical algorithm. A preferred, non-limiting example of a mathematical algorithm utilized for the comparison of two sequences is the algorithm of Karlin and Altschul (1990) Proc. Natl. Acad. Sci. USA 87:2264-2268, modified as in Karlin and Altschul (1993) Proc. Natl. Acad. Sci. USA 90:5873-5877. Such an algorithm is incorporated into the NBLAST and XBLAST programs of Altschul, el al. (1990) J. Mol. Biol. 215:403-410. BLAST nucleotide searches can be performed with the NBLAST program, score=100, wordlength=12 to obtain nucleotide sequences homologous to a nucleic acid molecules of the invention. BLAST protein searches can be performed with the XBLAST program, score=50, wordlength=3 to obtain amino acid sequences homologous to a protein molecules of the invention. To obtain gapped alignments for comparison purposes, Gapped BLAST can be utilized as described in Altschul et al. (1997) Nucleic Acids Res. 25:3389-3402. Alternatively, PSI-Blast can be used to perform an iterated search which detects distant relationships between molecules. When utilizing BLAST, Gapped BLAST, and PSI-Blast programs, the default parameters of the respective programs (e.g., XBLAST and NBLAST) can be used. See http://www.ncbi.nlm.nih.gov. Another preferred, non-limiting example of a mathematical algorithm utilized for the comparison of sequences is the algorithm of Myers and Miller, (1988) CABIOS4:11-17. Such an algorithm is incorporated into the ALIGN program (version 2.0) which is part of the GCG sequence alignment software package. When utilizing the ALIGN program for comparing amino acid sequences, a PAM120 weight residue table, a gap length penalty of 12, and a gap penalty of 4 can be used. Yet another useful algorithm for identifying regions of local sequence similarity and alignment is the FASTA algorithm as described in Pearson and Lipman (1988) Proc. Natl. Acad Sci. USA 85:2444-2448. When using the FASTA algorithm for comparing nucleotide or amino acid sequences, a PAM120 weight residue table can, for example, be used with a κ-tuple value of 2.

[0193] The percent identity between two sequences can be determined using techniques similar to those described above, with or without allowing gaps. In calculating percent identity, only exact matches are counted.

[0194] The invention also provides chimeric or fusion proteins corresponding to a marker gene of the invention. As used herein, a “chimeric protein” or “fusion protein” comprises all or part (preferably a biologically active part) of a polypeptide encoded by a marker gene of the invention operably linked to a heterologous polypeptide (i.e., a polypeptide other than the polypeptide encoded by the marker gene). Within the fusion protein, the term “operably linked” is intended to indicate that the polypeptide of the invention and the heterologous polypeptide are fused in-frame to each other. The heterologous polypeptide can be fused to the amino-terminus or the carboxyl-terminus of the polypeptide of the invention.

[0195] One useful fusion protein is a GST fusion protein in which a polypeptide encoded by a marker gene of the invention is fused to the carboxyl terminus of GST sequences. Such fusion proteins can facilitate the purification of a recombinant polypeptide of the invention.

[0196] In another embodiment, the fusion protein contains a heterologous signal sequence at its amino terminus. For example, the native signal sequence of a polypeptide encoded by a marker gene of the invention can be removed and replaced with a signal sequence from another protein. For example, the gp67 secretory sequence of the baculovirus envelope protein can be used as a heterologous signal sequence (Ausubel et al., ed., Current Protocols in Molecular Biology, John Wiley & Sons, NY, 1992). Other examples of eukaryotic heterologous signal sequences include the secretory sequences of melittin and human placental alkaline phosphatase (Stratagene; La Jolla, Calif.). In yet another example, useful prokaryotic heterologous signal sequences include the phoA secretory signal (Sambrook et al., supra) and the protein A secretory signal (Pharmacia Biotech; Piscataway, N.J.).

[0197] In yet another embodiment, the fusion protein is an immunoglobulin fusion protein in which all or part of a polypeptide encoded by a marker gene of the invention is fused to sequences derived from a member of the immunoglobulin protein family. The immunoglobulin fusion proteins of the invention can be incorporated into pharmaceutical compositions and administered to a subject to inhibit an interaction between a ligand (soluble or membrane-bound) and a protein on the surface of a cell (receptor), to thereby suppress signal transduction in vivo. The immunoglobulin fusion protein can be used to affect the bioavailability of a cognate ligand of a polypeptide of the invention. Inhibition of ligand/receptor interaction can be useful therapeutically, both for treating proliferative and differentiative disorders and for modulating (e.g. promoting or inhibiting) cell survival. Moreover, the immunoglobulin fusion proteins of the invention can be used as immunogens to produce antibodies directed against a polypeptide of the invention in a subject, to purify ligands and in screening assays to identify molecules which inhibit the interaction of receptors with ligands.

[0198] Chimeric and fusion proteins of the invention can be produced by standard recombinant DNA techniques. In another embodiment, the fusion gene can be synthesized by conventional techniques including automated DNA synthesizers. Alternatively, PCR amplification of gene fragments can be carried out using anchor primers which give rise to complementary overhangs between two consecutive gene fragments which can subsequently be annealed and re-amplified to generate a chimeric gene sequence (see, e.g., Ausubel et al., supra). Moreover, many expression vectors are commercially available that already encode a fusion moiety (e.g., a GST polypeptide). A nucleic acid encoding a polypeptide of the invention can be cloned into such an expression vector such that the fusion moiety is linked in-frame to the polypeptide of the invention.

[0199] A signal sequence can be used to facilitate secretion and isolation of the secreted protein or other proteins of interest. Signal sequences are typically characterized by a core of hydrophobic amino acids which are generally cleaved from the mature protein during secretion in one or more cleavage events. Such signal peptides contain processing sites that allow cleavage of the signal sequence from the mature proteins as they pass through the secretory pathway. Thus, the invention pertains to the described polypeptides having a signal sequence, as well as to polypeptides from which the signal sequence has been proteolytically cleaved (i.e., the cleavage products). In one embodiment, a nucleic acid sequence encoding a signal sequence can be operably linked in an expression vector to a protein of interest, such as a protein which is ordinarily not secreted or is otherwise difficult to isolate. The signal sequence directs secretion of the protein, such as from a eukaryotic host into which the expression vector is transformed, and the signal sequence is subsequently or concurrently cleaved. The protein can then be readily purified from the extracellular medium by art recognized methods. Alternatively, the signal sequence can be linked to the protein of interest using a sequence which facilitates purification, such as with a GST domain.

[0200] The present invention also pertains to variants of the polypeptides encoded by individual marker genes of the invention. Such variants have an altered amino acid sequence which can function as either agonists (mimetics) or as antagonists. Variants can be generated by mutagenesis, e.g., discrete point mutation or truncation. An agonist can retain substantially the same, or a subset, of the biological activities of the naturally occurring form of the protein. An antagonist of a protein can inhibit one or more of the activities of the naturally occurring form of the protein by, for example, competitively binding to a downstream or upstream member of a cellular signaling cascade which includes the protein of interest. Thus, specific biological effects can be elicited by treatment with a variant of limited function. Treatment of a subject with a variant having a subset of the biological activities of the naturally occurring form of the protein can have fewer side effects in a subject relative to treatment with the naturally occurring form of the protein.

[0201] Variants of a protein of the invention which function as either agonists (mimetics) or as antagonists can be identified by screening combinatorial libraries of mutants, e.g., truncation mutants, of the protein of the invention for agonist or antagonist activity. In one embodiment, a variegated library of variants is generated by combinatorial mutagenesis at the nucleic acid level and is encoded by a variegated gene library. A variegated library of variants can be produced by, for example, enzymatically ligating a mixture of synthetic oligonucleotides into gene sequences such that a degenerate set of potential protein sequences is expressible as individual polypeptides, or alternatively, as a set of larger fusion proteins (e.g., for phage display). There are a variety of methods which can be used to produce libraries of potential variants of the polypeptides of the invention from a degenerate oligonucleotide sequence. Methods for synthesizing degenerate oligonucleotides are known in the art (see, e.g., Narang, 1983, Tetrahedron 39:3; Itakura et al., 1984, Annu. Rev. Biochem. 53:323; Itakura et al., 1984, Science 198:1056; Ike et al., 1983 Nucleic Acid Res. 11:477).

[0202] In addition, libraries of fragments of the coding sequence of a polypeptide encoded by a marker gene of the invention can be used to generate a variegated population of polypeptides for screening and subsequent selection of variants. For example, a library of coding sequence fragments can be generated by treating a double stranded PCR fragment of the coding sequence of interest with a nuclease under conditions wherein nicking occurs only about once per molecule, denaturing the double stranded DNA, renaturing the DNA to form double stranded DNA which can include sense/antisense pairs from different nicked products, removing single stranded portions from reformed duplexes by treatment with S1 nuclease, and ligating the resulting fragment library into an expression vector. By this method, an expression library can be derived which encodes amino terminal and internal fragments of various sizes of the protein of interest.

[0203] Several techniques are known in the art for screening gene products of combinatorial libraries made by point mutations or truncation, and for screening cDNA libraries for gene products having a selected property. The most widely used techniques, which are amenable to high through-put analysis, for screening large gene libraries typically include cloning the gene library into replicable expression vectors, transforming appropriate cells with the resulting library of vectors, and expressing the combinatorial genes under conditions in which detection of a desired activity facilitates isolation of the vector encoding the gene whose product was detected. Recursive ensemble mutagenesis (REM), a technique which enhances the frequency of functional mutants in the libraries, can be used in combination with the screening assays to identify variants of a protein of the invention (Arkin and Yourvan, 1992, Proc. Natl. Acad. Sci. USA 89:7811-7815; Delgrave et al., 1993, Protein Engineering 6(3):327-331).

[0204] An isolated polypeptide encoded by a marker gene of the invention, or a fragment thereof, can be used as an immunogen to generate antibodies using standard techniques for polyclonal and monoclonal antibody preparation. The full-length polypeptide or protein can be used or, alternatively, the invention provides antigenic peptide fragments for use as immunogens. The antigenic peptide of a protein of the invention comprises at least 8 (preferably 10, 15, 20, or 30 or more) amino acid residues of the amino acid sequence of one of the polypeptides of the invention, and encompasses an epitope of the protein such that an antibody raised against the peptide forms a specific immune complex with a protein encoded by a marker gene of the invention. Preferred epitopes encompassed by the antigenic peptide are regions that are located on the surface of the protein, e.g., hydrophilic regions. Hydrophobicity sequence analysis, hydrophilicity sequence analysis, or similar analyses can be used to identify hydrophilic regions.

[0205] An immunogen typically is used to prepare antibodies by immunizing a suitable (i.e. immunocompetent) subject such as a rabbit, goat, mouse, or other mammal or vertebrate. An appropriate immunogenic preparation can contain, for example, recombinantly-expressed or chemically-synthesized polypeptide. The preparation can further include an adjuvant, such as Freund's complete or incomplete adjuvant, or a similar immunostimulatory agent.

[0206] Accordingly, another aspect of the invention pertains to antibodies directed against a polypeptide of the invention. The terms “antibody” and “antibody substance” as used interchangeably herein refer to immunoglobulin molecules and immunologically active portions of immunoglobulin molecules, i.e., molecules that contain an antigen binding site which specifically binds an antigen, such as a polypeptide of the invention, e.g., an epitope of a polypeptide of the invention. A molecule which specifically binds to a given polypeptide of the invention is a molecule which binds the polypeptide, but does not substantially bind other molecules in a sample, e.g., a biological sample, which naturally contains the polypeptide. Examples of immunologically active portions of immunoglobulin molecules include F(ab) and F(ab′)₂ fragments which can be generated by treating the antibody with an enzyme such as pepsin. The invention provides polyclonal and monoclonal antibodies. The term “monoclonal antibody” or “monoclonal antibody composition”, as used herein, refers to a population of antibody molecules that contain only one species of an antigen binding site capable of immunoreacting with a particular epitope.

[0207] Polyclonal antibodies can be prepared as described above by immunizing a suitable subject with a polypeptide of the invention as an immunogen. Preferred polyclonal antibody compositions are ones that have been selected for antibodies directed against a polypeptide or polypeptides of the invention. Particularly preferred polyclonal antibody preparations are ones that contain only antibodies directed against a polypeptide or polypeptides of the invention. Particularly preferred immunogen compositions are those that contain no other human proteins such as, for example, immunogen compositions made using a non-human host cell for recombinant expression of a polypeptide of the invention. In such a manner, the only human epitope or epitopes recognized by the resulting antibody compositions raised against this immunogen will be present as part of a polypeptide or polypeptides of the invention.

[0208] The antibody titer in the immunized subject can be monitored over time by standard techniques, such as with an enzyme linked immunosorbent assay (ELISA) using immobilized polypeptide. If desired, the antibody molecules can be harvested or isolated from the subject (e.g., from the blood or serum of the subject) and further purified by well-known techniques, such as protein A chromatography to obtain the IgG fraction. Alternatively, antibodies specific for a protein or polypeptide of the invention can be selected or (e.g., partially purified) or purified by, e.g., affinity chromatography. For example, a recombinantly expressed and purified (or partially purified) protein of the invention is produced as described herein, and covalently or non-covalently coupled to a solid support such as, for example, a chromatography column. The column can then be used to affinity purify antibodies specific for the proteins of the invention from a sample containing antibodies directed against a large number of different epitopes, thereby generating a substantially purified antibody composition, i.e., one that is substantially free of contaminating antibodies. By a substantially purified antibody composition is meant, in this context, that the antibody sample contains at most only 30% (by dry weight) of contaminating antibodies directed against epitopes other than those of the desired protein or polypeptide of the invention, and preferably at most 20%, yet more preferably at most 10%, and most preferably at most 5% (by dry weight) of the sample is contaminating antibodies. A purified antibody composition means that at least 99% of the antibodies in the composition are directed against the desired protein or polypeptide of the invention.

[0209] At an appropriate time after immunization, e.g., when the specific antibody titers are highest, antibody-producing cells can be obtained from the subject and used to prepare monoclonal antibodies by standard techniques, such as the hybridoma technique originally described by Kohler and Milstein (1975) Nature 256:495-497, the human B cell hybridoma technique (see Kozbor et al., 1983, Immunol. Today 4:72), the EBV-hybridoma technique (see Cole et al., pp. 77-96 In Monoclonal Antibodies and Cancer Therapy, Alan R. Liss, Inc., 1985) or trioma techniques. The technology for producing hybridomas is well known (see generally Current Protocols in Immunology, Coligan et al. ed., John Wiley & Sons, New York, 1994). Hybridoma cells producing a monoclonal antibody of the invention are detected by screening the hybridoma culture supernatants for antibodies that bind the polypeptide of interest, e.g., using a standard ELISA assay.

[0210] Alternative to preparing monoclonal antibody-secreting hybridomas, a monoclonal antibody directed against a polypeptide of the invention can be identified and isolated by screening a recombinant combinatorial immunoglobulin library (e.g., an antibody phage display library) with the polypeptide of interest. Kits for generating and screening phage display libraries are commercially available (e.g., the Pharmacia Recombinant Phage Antibody System, Catalog No. 27-9400-01; and the Stratagene SurfZAP Phage Display Kit, Catalog No. 240612). Additionally, examples of methods and reagents particularly amenable for use in generating and screening antibody display library can be found in, for example, U.S. Pat. No. 5,223,409; PCT Publication No. WO 92/18619; PCT Publication No. WO 91/17271; PCT Publication No. WO 92/20791; PCT Publication No. WO 92/15679; PCT Publication No. WO 93/01288; PCT Publication No. WO 92/01047; PCT Publication No. WO 92/09690; PCT Publication No. WO 90/02809; Fuchs et al. (1991) Bio/Technology 9:1370-1372; Hay et al. (1992) Hum. Antibod. Hybridomas 3:81-85; Huse et al. (1989) Science 246:1275-1281; Griffiths et al. (1993) EMBO J. 12:725-734.

[0211] Additionally, recombinant antibodies, such as chimeric and humanized monoclonal antibodies, comprising both human and non-human portions, which can be made using standard recombinant DNA techniques, are within the scope of the invention. A chimeric antibody is a molecule in which different portions are derived from different animal species, such as those having a variable region derived from a murine mAb and a human immunoglobulin constant region. (See, e.g., Cabilly et al., U.S. Pat. No. 4,816,567; and Boss et al., U.S. Pat. No. 4,816,397, which are incorporated herein by reference in their entirety.) Humanized antibodies are antibody molecules from non-human species having one or more complementarily determining regions (CDRs) from the non-human species and a framework region from a human immunoglobulin molecule. (See, e.g., Queen, U.S. Pat. No. 5,585,089, which is incorporated herein by reference in its entirety.) Such chimeric and humanized monoclonal antibodies can be produced by recombinant DNA techniques known in the art, for example using methods described in PCT Publication No. WO 87/02671; European Patent Application 184,187; European Patent Application 171,496; European Patent Application 173,494; PCT Publication No. WO 86/01533; U.S. Pat. No. 4,816,567; European Patent Application 125,023; Better et al. (1988) Science 240:1041-1043; Liu et al. (1987) Proc. Natl. Acad. Sci. USA 84:3439-3443; Liu et al. (1987) J. Immunol. 139:3521-3526; Sun et al. (1987) Proc. Natl. Acad. Sci. USA 84:214-218; Nishimura et al. (1987) Cancer Res. 47:999-1005; Wood et al. (1985) Nature 314:446-449; and Shaw et al. (1988) J. Natl. Cancer Inst. 80:1553-1559); Morrison (1985) Science 229:1202-1207; Oi et al. (1986) Bio/Techniques 4:214; U.S. Pat. No. 5,225,539; Jones et al. (1986) Nature 321:552-525; Verhoeyan et al. (1988) Science 239:1534; and Beidler et al. (1988) J. Immunol. 141:4053-4060.

[0212] Antibodies of the invention may be used as therapeutic agents in treating cancers. In a preferred embodiment, completely human antibodies of the invention are used for therapeutic treatment of human cancer patients, particularly those having breast cancer. Such antibodies can be produced, for example, using transgenic mice which are incapable of expressing endogenous immunoglobulin heavy and light chains genes, but which can express human heavy and light chain genes. The transgenic mice are immunized in the normal fashion with a selected antigen, e.g., all or a portion of a polypeptide encoded by a marker gene of the invention. Monoclonal antibodies directed against the antigen can be obtained using conventional hybridoma technology. The human immunoglobulin transgenes harbored by the transgenic mice rearrange during B cell differentiation, and subsequently undergo class switching and somatic mutation. Thus, using such a technique, it is possible to produce therapeutically useful IgG, IgA and IgE antibodies. For an overview of this technology for producing human antibodies, see Lonberg and Huszar (1995) Int. Rev. Immunol. 13:65-93). For a detailed discussion of this technology for producing human antibodies and human monoclonal antibodies and protocols for producing such antibodies, see, e.g., U.S. Pat. No. 5,625,126; U.S. Pat. No. 5,633,425; U.S. Pat. No. 5,569,825; U.S. Pat. No. 5,661,016; and U.S. Pat. No. 5,545,806. In addition, companies such as Abgenix, Inc. (Freemont, Calif.), can be engaged to provide human antibodies directed against a selected antigen using technology similar to that described above.

[0213] Completely human antibodies which recognize a selected epitope can be generated using a technique referred to as “guided selection.” In this approach a selected non-human monoclonal antibody, e.g., a murine antibody, is used to guide the selection of a completely human antibody recognizing the same epitope (Jespers et al., 1994, Bio/technology 12:899-903).

[0214] An antibody directed against a polypeptide encoded by a marker gene of the invention (e.g., a monoclonal antibody) can be used to isolate the polypeptide by standard techniques, such as affinity chromatography or immunoprecipitation. Moreover, such an antibody can be used to detect the polypeptide (e.g., in a cellular lysate or cell supernatant) in order to evaluate the level and pattern of expression of the marker gene. The antibodies can also be used diagnostically to monitor protein levels in tissues or body fluids (e.g in an ovary-associated body fluid) as part of a clinical testing procedure, e.g., to, for example, determine the efficacy of a given treatment regimen. Detection can be facilitated by coupling the antibody to a detectable substance. Examples of detectable substances include various enzymes, prosthetic groups, fluorescent materials, luminescent materials, bioluminescent materials, and radioactive materials. Examples of suitable enzymes include horseradish peroxidase, alkaline phosphatase, β-galactosidase, or acetylcholinesterase; examples of suitable prosthetic group complexes include streptavidin/biotin and avidin/biotin; examples of suitable fluorescent materials include umbelliferone, fluorescein, fluorescein isothiocyanate, rhodamine, dichlorotriazinylamine fluorescein, dansyl chloride or phycoerythrin; an example of a luminescent material includes luminol; examples of bioluminescent materials include luciferase, luciferin, and aequorin, and examples of suitable radioactive material include ¹²⁵I, ¹³¹I, ³⁵S or ³H.

[0215] Further, an antibody (or fragment thereof) can be conjugated to a therapeutic moiety such as a cytotoxin, a therapeutic agent or a radioactive metal ion. A cytotoxin or cytotoxic agent includes any agent that is detrimental to cells. Examples include taxol, cytochalasin B, gramicidin D, ethidium bromide, emetine, mitomycin, etoposide, tenoposide, vincristine, vinblastine, colchicin, doxorubicin, daunorubicin, dihydroxy anthracin dione, mitoxantrone, mithramycin, actinomycin D, 1-dehydrotestosterone, glucocorticoids, procaine, tetracaine, lidocaine, propranolol, and puromycin and analogs or homologs thereof. Therapeutic agents include, but are not limited to, antimetabolites (e.g., methotrexate, 6-mercaptopurine, 6-thioguanine, cytarabine, 5-fluorouracil decarbazine), alkylating agents (e.g., mechlorethamine, thioepa chlorambucil, melphalan, carmustine (BSNU) and lomustine (CCNU), cyclothosphamide, busulfan, dibromomannitol, streptozotocin, mitomycin C, and cis-dichlorodiamine platinum (II) (DDP) cisplatin), anthracyclines (e.g., daunorubicin (formerly daunomycin) and doxorubicin), antibiotics (e.g., dactinomycin (formerly actinomycin), bleomycin, mithramycin, and anthramycin (AMC)), and anti-mitotic agents (e.g., vincristine and vinblastine).

[0216] The conjugates of the invention can be used for modifying a given biological response, the drug moiety is not to be construed as limited to classical chemical therapeutic agents. For example, the drug moiety may be a protein or polypeptide possessing a desired biological activity. Such proteins may include, for example, a toxin such as abrin, ricin A, pseudomonas exotoxin, or diphtheria toxin; a protein such as tumor necrosis factor, .alpha.-interferon, .beta.-interferon, nerve growth factor, platelet derived growth factor, tissue plasminogen activator; or, biological response modifiers such as, for example, lymphokines, interleukin-1 (“IL-1”), interleukin-2 (“IL-2”), interleukin-6 (“IL-6”), granulocyte macrophase colony stimulating factor (“GM-CSF”), granulocyte colony stimulating factor (“G-CSF”), or other growth factors.

[0217] Techniques for conjugating such therapeutic moiety to antibodies are well known, see, e.g., Arnon et al., “Monoclonal Antibodies For Immunotargeting Of Drugs In Cancer Therapy”, in Monoclonal Antibodies And Cancer Therapy, Reisfeld et al. (eds.), pp. 243-56 (Alan R. Liss, Inc. 1985); Hellstrom et al., “Antibodies For Drug Delivery”, in Controlled Drug Delivery (2nd Ed.), Robinson et al. (eds.), pp. 623-53 (Marcel Dekker, Inc. 1987); Thorpe, “Antibody Carriers Of Cytotoxic Agents In Cancer Therapy: A Review”, in Monoclonal Antibodies '84: Biological And Clinical Applications, Pinchera et al. (eds.), pp. 475-506 (1985); “Analysis, Results, And Future Prospective Of The Therapeutic Use Of Radiolabeled Antibody In Cancer Therapy”, in Monoclonal Antibodies For Cancer Detection And Therapy, Baldwin et al. (eds.), pp. 303-16 (Academic Press 1985), and Thorpe et al., “The Preparation And Cytotoxic Properties Of Antibody-Toxin Conjugates”, Immunol. Rev., 62:119-58 (1982).

[0218] Alternatively, an antibody can be conjugated to a second antibody to form an antibody heteroconjugate as described by Segal in U.S. Pat. No. 4,676,980.

[0219] Accordingly, in one aspect, the invention provides substantially purified antibodies or fragments thereof, and non-human antibodies or fragments thereof, which antibodies or fragments specifically bind to a polypeptide comprising an amino acid sequence selected from the group consisting of the amino acid sequences of the present invention, an amino acid sequence encoded by the cDNA of the present invention, a fragment of at least 15 amino acid residues of an amino acid sequence of the present invention, an amino acid sequence which is at least 95% identical to the amino acid sequence of the present invention (wherein the percent identity is determined using the ALIGN program of the GCG software package with a PAM120 weight residue table, a gap length penalty of 12, and a gap penalty of 4) and an amino acid sequence which is encoded by a nucleic acid molecule which hybridizes to a nucleic acid molecule consisting of the nucleic acid molecules of the present invention, or a complement thereof, under conditions of hybridization of 6×SSC at 45° C. and washing in 0.2×SSC, 0.1% SDS at 65° C. In various embodiments, the substantially purified antibodies of the invention, or fragments thereof, can be human, non-human, chimeric and/or humanized antibodies.

[0220] In another aspect, the invention provides non-human antibodies or fragments thereof, which antibodies or fragments specifically bind to a polypeptide comprising an amino acid sequence selected from the group consisting of: the amino acid sequence of the present invention, an amino acid sequence encoded by the cDNA of the present invention, a fragment of at least 15 amino acid residues of the amino acid sequence of the present invention, an amino acid sequence which is at least 95% identical to the amino acid sequence of the present invention (wherein the percent identity is determined using the ALIGN program of the GCG software package with a PAM120 weight residue table, a gap length penalty of 12, and a gap penalty of 4) and an amino acid sequence which is encoded by a nucleic acid molecule which hybridizes to a nucleic acid molecule consisting of the nucleic acid molecules of the present invention, or a complement thereof, under conditions of hybridization of 6×SSC at 45° C. and washing in 0.2×SSC, 0.1% SDS at 65° C. Such non-human antibodies can be goat, mouse, sheep, horse, chicken, rabbit, or rat antibodies. Alternatively, the non-human antibodies of the invention can be chimeric and/or humanized antibodies. In addition, the non-human antibodies of the invention can be polyclonal antibodies or monoclonal antibodies.

[0221] In still a further aspect, the invention provides monoclonal antibodies or fragments thereof, which antibodies or fragments specifically bind to a polypeptide comprising an amino acid sequence selected from the group consisting of the amino acid sequences of the present invention, an amino acid sequence encoded by the cDNA of the present invention, a fragment of at least 15 amino acid residues of an amino acid sequence of the present invention, an amino acid sequence which is at least 95% identical to an amino acid sequence of the present invention (wherein the percent identity is determined using the ALIGN program of the GCG software package with a PAM120 weight residue table, a gap length penalty of 12, and a gap penalty of 4) and an amino acid sequence which is encoded by a nucleic acid molecule which hybridizes to a nucleic acid molecule consisting of the nucleic acid molecules of the present invention, or a complement thereof, under conditions of hybridization of 6×SSC at 45° C. and washing in 0.2×SSC, 0.1% SDS at 65° C. The monoclonal antibodies can be human, humanized, chimeric and/or non-human antibodies.

[0222] The substantially purified antibodies or fragments thereof may specifically bind to a signal peptide, a secreted sequence, an extracellular domain, a transmembrane or a cytoplasmic domain or cytoplasmic membrane of a polypeptide of the invention. In a particularly preferred embodiment, the substantially purified antibodies or fragments thereof, the non-human antibodies or fragments thereof, and/or the monoclonal antibodies or fragments thereof, of the invention specifically bind to a secreted sequence or an extracellular domain of the amino acid sequences of the present invention.

[0223] Any of the antibodies of the invention can be conjugated to a therapeutic moiety or to a detectable substance. Non-limiting examples of detectable substances that can be conjugated to the antibodies of the invention are an enzyme, a prosthetic group, a fluorescent material, a luminescent material, a bioluminescent material, and a radioactive material.

[0224] The invention also provides a kit containing an antibody of the invention conjugated to a detectable substance, and instructions for use. Still another aspect of the invention is a pharmaceutical composition comprising an antibody of the invention and a pharmaceutically acceptable carrier. In preferred embodiments, the pharmaceutical composition contains an antibody of the invention, a therapeutic moiety, and a pharmaceutically acceptable carrier.

[0225] Still another aspect of the invention is a method of making an antibody that specifically recognizes a polypeptide of the present invention, the method comprising immunizing a mammal with a polypeptide. The polypeptide used as an immunogen comprises an amino acid sequence selected from the group consisting of the amino acid sequence of the present invention, an amino acid sequence encoded by the cDNA of the nucleic acid molecules of the present invention, a fragment of at least 15 amino acid residues of the amino acid sequence of the present invention, an amino acid sequence which is at least 95% identical to the amino acid sequence of the present invention (wherein the percent identity is determined using the ALIGN program of the GCG software package with a PAM120 weight residue table, a gap length penalty of 12, and a gap penalty of 4) and an amino acid sequence which is encoded by a nucleic acid molecule which hybridizes to a nucleic acid molecule consisting of the nucleic acid molecules of the present invention, or a complement thereof, under conditions of hybridization of 6×SSC at 45° C. and washing in 0.2×SSC, 0.1% SDS at 65° C.

[0226] After immunization, a sample is collected from the mammal that contains an antibody that specifically recognizes the polypeptide. Preferably, the polypeptide is recombinantly produced using a non-human host cell. Optionally, the antibodies can be further purified from the sample using techniques well known to those of skill in the art. The method can further comprise producing a monoclonal antibody- producing cell from the cells of the mammal. Optionally, antibodies are collected from the antibody-producing cell.

[0227] III. Recombinant Expression Vectors and Host Cells

[0228] Another aspect of the invention pertains to vectors, preferably expression vectors, containing a nucleic acid encoding a polypeptide encoded by a marker gene of the invention (or a portion of such a polypeptide). As used herein, the term “vector” refers to a nucleic acid molecule capable of transporting another nucleic acid to which it has been linked. One type of vector is a “plasmid”, which refers to a circular double stranded DNA loop into which additional DNA segments can be ligated. Another type of vector is a viral vector, wherein additional DNA segments can be ligated into the viral genome. Certain vectors are capable of autonomous replication in a host cell into which they are introduced (e.g., bacterial vectors having a bacterial origin of replication and episomal mammalian vectors). Other vectors (e.g., non-episomal mammalian vectors) are integrated into the genome of a host cell upon introduction into the host cell, and thereby are replicated along with the host genome. Moreover, certain vectors, namely expression vectors, are capable of directing the expression of genes to which they are operably linked. In general, expression vectors of utility in recombinant DNA techniques are often in the form of plasmids (vectors). However, the invention is intended to include such other forms of expression vectors, such as viral vectors (e.g., replication defective retroviruses, adenoviruses and adeno-associated viruses), which serve equivalent functions.

[0229] The recombinant expression vectors of the invention comprise a nucleic acid of the invention in a form suitable for expression of the nucleic acid in a host cell. This means that the recombinant expression vectors include one or more regulatory sequences, selected on the basis of the host cells to be used for expression, which is operably linked to the nucleic acid sequence to be expressed. Within a recombinant expression vector, “operably linked” is intended to mean that the nucleotide sequence of interest is linked to the regulatory sequence(s) in a manner which allows for expression of the nucleotide sequence (e.g., in an in vitro transcription/translation system or in a host cell when the vector is introduced into the host cell). The term “regulatory sequence” is intended to include promoters, enhancers and other expression control elements (e.g., polyadenylation signals). Such regulatory sequences are described, for example, in Goeddel, Methods in Enzymology: Gene Expression Technology vol. 185, Academic Press, San Diego, Calif. (1991). Regulatory sequences include those which direct constitutive expression of a nucleotide sequence in many types of host cell and those which direct expression of the nucleotide sequence only in certain host cells (e.g., tissue-specific regulatory sequences). It will be appreciated by those skilled in the art that the design of the expression vector can depend on such factors as the choice of the host cell to be transformed, the level of expression of protein desired, and the like. The expression vectors of the invention can be introduced into host cells to thereby produce proteins or peptides, including fusion proteins or peptides, encoded by nucleic acids as described herein.

[0230] The recombinant expression vectors of the invention can be designed for expression of a polypeptide encoded by a marker gene of the invention in prokaryotic (e.g., E. coli) or eukaryotic cells (e.g., insect cells {using baculovirus expression vectors}, yeast cells or mammalian cells). Suitable host cells are discussed further in Goeddel, supra. Alternatively, the recombinant expression vector can be transcribed and translated in vitro, for example using T7 promoter regulatory sequences and T7 polymerase.

[0231] Expression of proteins in prokaryotes is most often carried out in E. coli with vectors containing constitutive or inducible promoters directing the expression of either fusion or non-fusion proteins. Fusion vectors add a number of amino acids to a protein encoded therein, usually to the amino terminus of the recombinant protein. Such fusion vectors typically serve three purposes: 1) to increase expression of recombinant protein; 2) to increase the solubility of the recombinant protein; and 3) to aid in the purification of the recombinant protein by acting as a ligand in affinity purification. Often, in fusion expression vectors, a proteolytic cleavage site is introduced at the junction of the fusion moiety and the recombinant protein to enable separation of the recombinant protein from the fusion moiety subsequent to purification of the fusion protein. Such enzymes, and their cognate recognition sequences, include Factor Xa, thrombin and enterokinase. Typical fusion expression vectors include pGEX (Pharmacia Biotech Inc; Smith and Johnson, 1988, Gene 67:31-40), pMAL (New England Biolabs, Beverly, Mass.) and pRIT5 (Pharmacia, Piscataway, N.J.) which fuse glutathione S-transferase (GST), maltose E binding protein, or protein A, respectively, to the target recombinant protein.

[0232] Examples of suitable inducible non-fusion E. coli expression vectors include pTrc (Amann et al., 1988, Gene 69:301-315) and pET 11d (Studier et al., p. 60-89, In Gene Expression Technology: Methods in Enzymology vol. 185, Academic Press, San Diego, Calif., 1991). Target gene expression from the pTrc vector relies on host RNA polymerase transcription from a hybrid trp-lac fusion promoter. Target gene expression from the pET 11d vector relies on transcription from a T7 gn 10-lac fusion promoter mediated by a co-expressed viral RNA polymerase (T7 gn1). This viral polymerase is supplied by host strains BL21 (DE3) or HMS174(DE3) from a resident prophage harboring a T7 gn1 gene under the transcriptional control of the lacUV 5 promoter.

[0233] One strategy to maximize recombinant protein expression in E. coli is to express the protein in a host bacteria with an impaired capacity to proteolytically cleave the recombinant protein (Gottesman, p. 119-128, In Gene Expression Technology. Methods in Enzymology vol. 185, Academic Press, San Diego, Calif., 1990. Another strategy is to alter the nucleic acid sequence of the nucleic acid to be inserted into an expression vector so that the individual codons for each amino acid are those preferentially utilized in E. coli (Wada et al., 1992, Nucleic Acids Res. 20:2111-2118). Such alteration of nucleic acid sequences of the invention can be carried out by standard DNA synthesis techniques.

[0234] In another embodiment, the expression vector is a yeast expression vector. Examples of vectors for expression in yeast S. cerevisiae include pYepSec1 (Baldari et al., 1987, EMBO J. 6:229-234), pMFa (Kurjan and Herskowitz, 1982, Cell 30:933-943), pJRY88 (Schultz et al., 1987, Gene 54:113-123), pYES2 (Invitrogen Corporation, San Diego, Calif.), and pPicZ (Invitrogen Corp, San Diego, Calif.).

[0235] Alternatively, the expression vector is a baculovirus expression vector. Baculovirus vectors available for expression of proteins in cultured insect cells (e.g., Sf 9 cells) include the pAc series (Smith et al., 1983, Mol. Cell Biol. 3:2156-2165) and the pVL series (Lucklow and Summers, 1989, Virology 170:31-39).

[0236] In yet another embodiment, a nucleic acid of the invention is expressed in mammalian cells using a mammalian expression vector. Examples of mammalian expression vectors include pCDM8 (Seed, 1987, Nature 329:840) and pMT2NOPC (Kaufman et al., 1987, EMBO J. 6:187-195). When used in mammalian cells, the expression vector's control functions are often provided by viral regulatory elements. For example, commonly used promoters are derived from polyoma, Adenovirus 2, cytomegalovirus and Simian Virus 40. For other suitable expression systems for both prokaryotic and eukaryotic cells see chapters 16 and 17 of Sambrook et al., supra.

[0237] In another embodiment, the recombinant mammalian expression vector is capable of directing expression of the nucleic acid preferentially in a particular cell type (e.g., tissue-specific regulatory elements are used to express the nucleic acid). Tissue-specific regulatory elements are known in the art. Non-limiting examples of suitable tissue-specific promoters include the albumin promoter (liver-specific; Pinkert et al., 1987, Genes Dev. 1:268-277), lymphoid-specific promoters (Calame and Eaton, 1988, Adv. Immunol. 43:235-275), in particular promoters of T cell receptors (Winoto and Baltimore, 1989, EMBO J. 8:729-733) and immunoglobulins (Banerji et al., 1983, Cell 33:729-740; Queen and Baltimore, 1983, Cell 33:741-748), neuron-specific promoters (e.g., the neurofilament promoter; Byrne and Ruddle, 1989, Proc. Natl. Acad. Sci. USA 86:5473-5477), pancreas-specific promoters (Edlund et al., 1985, Science 230:912-916), and mammary gland-specific promoters (e.g., milk whey promoter; U.S. Pat. No. 4,873,316 and European Application Publication No. 264,166). Developmentally-regulated promoters are also encompassed, for example the murine hox promoters (Kessel and Gruss, 1990, Science 249:374-379) and the α-fetoprotein promoter (Camper and Tilghman, 1989, Genes Dev. 3:537-546).

[0238] The invention further provides a recombinant expression vector comprising a DNA molecule of the invention cloned into the expression vector in an antisense orientation. That is, the DNA molecule is operably linked to a regulatory sequence in a manner which allows for expression (by transcription of the DNA molecule) of an RNA molecule which is antisense to the mRNA encoding a polypeptide of the invention. Regulatory sequences operably linked to a nucleic acid cloned in the antisense orientation can be chosen which direct the continuous expression of the antisense RNA molecule in a variety of cell types, for instance viral promoters and/or enhancers, or regulatory sequences can be chosen which direct constitutive, tissue-specific or cell type specific expression of antisense RNA. The antisense expression vector can be in the form of a recombinant plasmid, phagemid, or attenuated virus in which antisense nucleic acids are produced under the control of a high efficiency regulatory region, the activity of which can be determined by the cell type into which the vector is introduced. For a discussion of the regulation of gene expression using antisense genes see Weintraub et al., 1986, Trends in Genetics, Vol. 1(1).

[0239] Another aspect of the invention pertains to host cells into which a recombinant expression vector of the invention has been introduced. The terms “host cell” and “recombinant host cell” are used interchangeably herein. It is understood that such terms refer not only to the particular subject cell but to the progeny or potential progeny of such a cell. Because certain modifications may occur in succeeding generations due to either mutation or environmental influences, such progeny may not, in fact, be identical to the parent cell, but are still included within the scope of the term as used herein.

[0240] A host cell can be any prokaryotic (e.g., E. coli) or eukaryotic cell (e.g., insect cells, yeast or mammalian cells).

[0241] Vector DNA can be introduced into prokaryotic or eukaryotic cells via conventional transformation or transfection techniques. As used herein, the terms “transformation” and “transfection” are intended to refer to a variety of art-recognized techniques for introducing foreign nucleic acid into a host cell, including calcium phosphate or calcium chloride co-precipitation, DEAE-dextran-mediated transfection, lipofection, or electroporation. Suitable methods for transforming or transfecting host cells can be found in Sambrook, et al. (supra), and other laboratory manuals.

[0242] For stable transfection of mammalian cells, it is known that, depending upon the expression vector and transfection technique used, only a small fraction of cells may integrate the foreign DNA into their genome. In order to identify and select these integrants, a gene that encodes a “selectable marker” (SM) gene (e.g., for resistance to antibiotics) is generally introduced into the host cells along with the gene of interest. Preferred SM genes include those which confer resistance to drugs, such as G418, hygromycin and methotrexate. Cells stably transfected with the introduced nucleic acid can be identified by drug selection (e.g., cells that have incorporated the SM gene will survive, while the other cells die).

[0243] A host cell of the invention, such as a prokaryotic or eukaryotic host cell in culture, can be used to produce a polypeptide encoded by a marker gene of the invention. Accordingly, the invention further provides methods for producing a polypeptide encoded by a marker gene of the invention using the host cells of the invention. In one embodiment, the method comprises culturing the host cell of invention (into which a recombinant expression vector encoding a polypeptide of the invention has been introduced) in a suitable medium such that the polypeptide encoded by the marker gene is produced. In another embodiment, the method further comprises isolating the polypeptide from the medium or the host cell.

[0244] The host cells of the invention can also be used to produce nonhuman transgenic animals. For example, in one embodiment, a host cell of the invention is a fertilized oocyte or an embryonic stem cell into which a sequences encoding a polypeptide of a marker gene of the invention have been introduced. Such host cells can then be used to create non-human transgenic animals in which exogenous sequences encoding a marker gene of the invention have been introduced into their genome or homologous recombinant animals in which endogenous gene(s) encoding a polypeptide corresponding to a marker gene of the invention have been altered. Such animals are useful for studying the function and/or activity of the polypeptide corresponding to the marker gene and for identifying and/or evaluating modulators of polypeptide activity. As used herein, a “transgenic animal” is a non-human animal, preferably a mammal, more preferably a rodent such as a rat or mouse, in which one or more of the cells of the animal includes a transgene. Other examples of transgenic animals include non-human primates, sheep, dogs, cows, goats, chickens, amphibians, etc. A transgene is exogenous DNA which is integrated into the genome of a cell from which a transgenic animal develops and which remains in the genome of the mature animal, thereby directing the expression of an encoded gene product in one or more cell types or tissues of the transgenic animal. As used herein, an “homologous recombinant animal” is a non-human animal, preferably a mammal, more preferably a mouse, in which an endogenous gene has been altered by homologous recombination between the endogenous gene and an exogenous DNA molecule introduced into a cell of the animal, e.g., an embryonic cell of the animal, prior to development of the animal.

[0245] A transgenic animal of the invention can be created by introducing a nucleic acid encoding a polypeptide encoded by a marker gene of the invention into the male pronuclei of a fertilized oocyte, e.g., by microinjection, retroviral infection, and allowing the oocyte to develop in a pseudopregnant female foster animal. Intronic sequences and polyadenylation signals can also be included in the transgene to increase the efficiency of expression of the transgene. A tissue-specific regulatory sequence(s) can be operably linked to the transgene to direct expression of the polypeptide of the invention to particular cells. Methods for generating transgenic animals via embryo manipulation and microinjection, particularly animals such as mice, have become conventional in the art and are described, for example, in U.S. Pat. Nos. 4,736,866 and 4,870,009, U.S. Pat. No. 4,873,191 and in Hogan, Manipulating the Mouse Embryo, Cold Spring Harbor Laboratory Press, Cold Spring Harbor, N.Y., 1986. Similar methods are used for production of other transgenic animals. A transgenic founder animal can be identified based upon the presence of the transgene in its genome and/or expression of mRNA encoding the transgene in tissues or cells of the animals. A transgenic founder animal can then be used to breed additional animals carrying the transgene. Moreover, transgenic animals carrying the transgene can further be bred to other transgenic animals carrying other transgenes.

[0246] To create an homologous recombinant animal, a vector is prepared which contains at least a portion of a marker gene of the invention into which a deletion, addition or substitution has been introduced to thereby alter, e.g., functionally disrupt, the gene. In a preferred embodiment, the vector is designed such that, upon homologous recombination, the endogenous gene is functionally disrupted (i.e., no longer encodes a functional protein; also referred to as a “knock out” vector). Alternatively, the vector can be designed such that, upon homologous recombination, the endogenous gene is mutated or otherwise altered but still encodes functional protein (e.g., the upstream regulatory region can be altered to thereby alter the expression of the endogenous protein). In the homologous recombination vector, the altered portion of the gene is flanked at its 5′ and 3′ ends by additional nucleic acid of the gene to allow for homologous recombination to occur between the exogenous gene carried by the vector and an endogenous gene in an embryonic stem cell. The additional flanking nucleic acid sequences are of sufficient length for successful homologous recombination with the endogenous gene. Typically, several kilobases of flanking DNA (both at the 5′ and 3′ ends) are included in the vector (see, e.g., Thomas and Capecchi, 1987, Cell 51:503 for a description of homologous recombination vectors). The vector is introduced into an embryonic stem cell line (e.g., by electroporation) and cells in which the introduced gene has homologously recombined with the endogenous gene are selected (see, e.g., Li et al., 1992, Cell 69:915). The selected cells are then injected into a blastocyst of an animal (e.g., a mouse) to form aggregation chimeras (see, e.g., Bradley, Teralocarcinomas and Embryonic Stem Cells. A Practical Approach, Robertson, Ed., IRL, Oxford, 1987, pp. 113-152). A chimeric embryo can then be implanted into a suitable pseudopregnant female foster animal and the embryo brought to term. Progeny harboring the homologously recombined DNA in their germ cells can be used to breed animals in which all cells of the animal contain the homologously recombined DNA by germline transmission of the transgene. Methods for constructing homologous recombination vectors and homologous recombinant animals are described further in Bradley (1991) Current Opinion in Bio/Technology 2:823-829 and in PCT Publication NOS. WO 90/11354, WO 91/01140, WO 92/0968, and WO 93/04169.

[0247] In another embodiment, transgenic non-human animals can be produced which contain selected systems which allow for regulated expression of the transgene. One example of such a system is the cre/loxP recombinase system of bacteriophage P1. For a description of the cre/loxP recombinase system, see, e.g, Lakso et al. (1992) Proc. Natl. Acad. Sci. USA 89:6232-6236. Another example of a recombinase system is the FLP recombinase system of Saccharomyces cerevisiae (O'Gorman et al., 1991, Science 251:1351-1355). If a cre/loxP recombinase system is used to regulate expression of the transgene, animals containing transgenes encoding both the Cre recombinase and a selected protein are required. Such animals can be provided through the construction of “double” transgenic animals, e.g., by mating two transgenic animals, one containing a transgene encoding a selected protein and the other containing a transgene encoding a recombinase.

[0248] Clones of the non-human transgenic animals described herein can also be produced according to the methods described in Wilmut et al. (1997) Nature 385:810-813 and PCT Publication NOS. WO 97/07668 and WO 97/07669.

[0249] IV. Pharmaceutical Compositions

[0250] The nucleic acid molecules, polypeptides, and antibodies (also referred to herein as “active compounds”) encoded by or corresponding to a marker gene of the invention can be incorporated into pharmaceutical compositions suitable for administration. Such compositions typically comprise the nucleic acid molecule, protein, or antibody and a pharmaceutically acceptable carrier. As used herein the language “pharmaceutically acceptable carrier” is intended to include any and all solvents, dispersion media, coatings, antibacterial and antifungal agents, isotonic and absorption delaying agents, and the like, compatible with pharmaceutical administration. The use of such media and agents for pharmaceutically active substances is well known in the art. Except insofar as any conventional media or agent is incompatible with the active compound, use thereof in the compositions is contemplated. Supplementary active compounds can also be incorporated into the compositions.

[0251] The invention includes methods for preparing pharmaceutical compositions for modulating the expression or activity of a polypeptide or nucleic acid encoded by a marker gene of the invention. Such methods comprise formulating a pharmaceutically acceptable carrier with an agent which modulates expression or activity of a polypeptide or nucleic acid encoded by a marker gene of the invention. Such compositions can further include additional active agents. Thus, the invention further includes methods for preparing a pharmaceutical composition by formulating a pharmaceutically acceptable carrier with an agent which modulates expression or activity of a polypeptide or nucleic acid encoded by a marker gene of the invention and one or more additional active compounds.

[0252] The invention also provides methods (also referred to herein as “screening assays”) for identifying modulators, i.e., candidate or test compounds or agents (e.g., peptides, peptidomimetics, peptoids, small molecules or other drugs) which (a) bind to the marker gene or its gene products, or (b) have a modulatory (e.g., stimulatory or inhibitory) effect on the activity of the marker gene or, more specifically, (c) have a modulatory effect on the interactions of a protein encoded by the marker gene (hereinafter “marker protein”) with one or more of its natural substrates (e.g., peptide, protein, hormone, co-factor, or nucleic acid), or (d) have a modulatory effect on the expression of the marker gene. Such assays typically comprise a reaction between the marker gene or the marker protein and one or more assay components. The other components may be either the test compound itself, or a combination of test compound and a natural binding partner of the marker protein.

[0253] The test compounds of the present invention may be obtained from any available source, including systematic libraries of natural and/or synthetic compounds. Test compounds may also be obtained by any of the numerous approaches in combinatorial library methods known in the art, including: biological libraries; peptoid libraries (libraries of molecules having the functionalities of peptides, but with a novel, non-peptide backbone which are resistant to enzymatic degradation but which nevertheless remain bioactive; see, e.g., Zuckermann et al., 1994, J. Med. Chem. 37:2678-85); spatially addressable parallel solid phase or solution phase libraries; synthetic library methods requiring deconvolution; the ′one-bead one-compound′ library method; and synthetic library methods using affinity chromatography selection. The biological library and peptoid library approaches are limited to peptide libraries, while the other four approaches are applicable to peptide, non-peptide oligomer or small molecule libraries of compounds (Lam, 1997, Anticancer Drug Des. 12:145).

[0254] Examples of methods for the synthesis of molecular libraries can be found in the art, for example in: DeWitt et al. (1993) Proc. Natl. Acad Sci. U.S.A. 90:6909; Erb et al. (1994) Proc. Natl. Acad. Sci. USA 91:11422; Zuckermann et al. (1994). J. Med. Chem. 37:2678; Cho etal. (1993) Science 261:1303; Carrell et al. (1994) Angew. Chem. Int. Ed. Engl. 33:2059; Carell et al. (1994) Angew. Chem. Int. Ed. Engl. 33:2061; and in Gallop et al. (1994) J Med. Chem. 37:1233.

[0255] Libraries of compounds may be presented in solution (e.g., Houghten, 1992, Biotechniques 13:412-421), or on beads (Lam, 1991, Nature 354:82-84), chips (Fodor, 1993, Nature 364:555-556), bacteria and/or spores, (Ladner, U.S. Pat. No. 5,223,409), plasmids (Cull et al, 1992, Proc Natl Acad Sci USA 89:1865-1869) or on phage (Scott and Smith, 1990, Science 249:386-390; Devlin, 1990, Science 249:404-406; Cwirla et al, 1990, Proc. Natl. Acad. Sci. 87:6378-6382; Felici, 1991, J. Mol. Biol. 222:301-310; Ladner, supra.).

[0256] In one embodiment, the invention provides assays for screening candidate or test compounds which are substrates of the marker protein or biologically active portion thereof. In another embodiment, the invention provides assays for screening candidate or test compounds which bind to a marker protein or biologically active portion thereof. Determining the ability of the test compound to directly bind to a marker protein can be accomplished, for example, by coupling the compound with a radioisotope or enzymatic label such that binding of the compound to the marker protein can be determined by detecting the marker protein compound in a labeled complex. For example, compounds (e.g., substrates of the marker protein) can be labeled with ¹²⁵I, ³⁵S, ¹⁴C, or ³H, either directly or indirectly, and the radioisotope detected by direct counting of radioemission or by scintillation counting. Alternatively, assay components can be enzymatically labeled with, for example, horseradish peroxidase, alkaline phosphatase, or luciferase, and the enzymatic label detected by determination of conversion of an appropriate substrate to product.

[0257] In another embodiment, the invention provides assays for screening candidate or test compounds which modulate the activity of a marker protein or a biologically active portion thereof. In all likelihood, the marker protein can, in vivo, interact with one or more molecules, such as but not limited to, peptides, proteins, hormones, cofactors and nucleic acids. For the purposes of this discussion, such cellular and extracellular molecules are referred to herein as “binding partners” or marker protein “substrate”. One necessary embodiment of the invention in order to facilitate such screening is the use of the marker protein to identify its natural in vivo binding partners. There are many ways to accomplish this which are known to one skilled in the art. One example is the use of the marker protein as “bait protein” in a two-hybrid assay or three-hybrid assay (see, e.g., U.S. Pat. No. 5,283,317; Zervos et al, 1993, Cell 72:223-232; Madura et al, 1993, J. Biol. Chem. 268:12046-12054; Bartel et al ,1993, Biotechniques 14:920-924; Iwabuchi et al, 1993 Oncogene 8:1693-1696; Brent WO94/10300) in order to identify other proteins which bind to or interact with the marker protein (binding partners) and, therefore, are possibly involved in the natural function of the marker protein. Such marker protein binding partners are also likely to be involved in the propagation of signals by the marker protein or downstream elements of a marker gene-mediated signaling pathway. Alternatively, such marker protein binding partners may also be found to be inhibitors of the marker protein .

[0258] The two-hybrid system is based on the modular nature of most transcription factors, which consist of separable DNA-binding and activation domains. Briefly, the assay utilizes two different DNA constructs. In one construct, the gene that encodes a marker protein fused to a gene encoding the DNA binding domain of a known transcription factor (e.g., GAL-4). In the other construct, a DNA sequence, from a library of DNA sequences, that encodes an unidentified protein (“prey” or “sample”) is fused to a gene that codes for the activation domain of the known transcription factor. If the “bait” and the “prey” proteins are able to interact, in vivo, forming a marker gene-dependent complex, the DNA-binding and activation domains of the transcription factor are brought into close proximity. This proximity allows transcription of a reporter gene (e.g., LacZ) which is operably linked to a transcriptional regulatory site responsive to the transcription factor. Expression of the reporter gene can be readily detected and cell colones containing the functional transcription factor can be isolated and used to obtain the cloned gene which encodes the protein which interacts with the marker protein.

[0259] In a further embodiment, assays may be devised through the use of the invention for the purpose of identifying compounds which modulate (e.g., affect either positively or negatively) interactions between a marker protein and its substrates and/or binding partners. Such compounds can include, but are not limited to, molecules such as antibodies, peptides, hormones, oligonucleotides, nucleic acids, and analogs thereof. Such compounds may also be obtained from any available source, including systematic libraries of natural and/or synthetic compounds. The preferred assay components for use in this embodiment is a marker protein identified herein (see Table 1), the known binding partner and/or substrate of same, and the test compound. Test compounds can be supplied from any source.

[0260] The basic principle of the assay systems used to identify compounds that interfere with the interaction between a marker protein and its binding partner involves preparing a reaction mixture containing the protein and its binding partner under conditions and for a time sufficient to allow the two products to interact and bind, thus forming a complex. In order to test an agent for inhibitory activity, the reaction mixture is prepared in the presence and absence of the test compound. The test compound can be initially included in the reaction mixture, or can be added at a time subsequent to the addition of the protein and its binding partner. Control reaction mixtures are incubated without the test compound or with a placebo. The formation of any complexes between the protein and its binding partner is then detected. The formation of a complex in the control reaction, but less or no such formation in the reaction mixture containing the test compound, indicates that the compound interferes with the interaction of the marker protein and its binding partner. Conversely, the formation of more complex in the presence of compound than in the control reaction indicates that the compound may enhance interaction of the marker protein and its binding partner.

[0261] The assay for compounds that interfere with the interaction of a marker protein with its binding partner may be conducted in a heterogeneous or homogeneous format. Heterogeneous assays involve anchoring either the marker protein or its binding partner onto a solid phase and detecting complexes anchored to the solid phase at the end of the reaction. In homogeneous assays, the entire reaction is carried out in a liquid phase. In either approach, the order of addition of reactants can be varied to obtain different information about the compounds being tested. For example, test compounds that interfere with the interaction between the marker protein and the binding partners (e.g., by competition) can be identified by conducting the reaction in the presence of the test substance, i.e., by adding the test substance to the reaction mixture prior to or simultaneously with the marker protein and its interactive binding partner. Alternatively, test compounds that disrupt preformed complexes, e.g., compounds with higher binding constants, that displace one of the components from the complex, can be tested by adding the test compound to the reaction mixture after complexes have been formed. The various formats are briefly described below.

[0262] In a heterogeneous assay system, either a marker protein or its binding partner is anchored onto a solid surface or matrix, while the other corresponding non-anchored component may be labeled, either directly or indirectly. In practice, microtitre plates are often utilized for this approach. The anchored species can be immobilized by a number of methods, either non-covalent or covalent, that are typically well known to one who practices the art. Non-covalent attachment can often be accomplished simply by coating the solid surface with a solution of the marker protein or its binding partner and drying. Alternatively, an immobilized antibody specific for the assay component to be anchored can be used for this purpose. Such surfaces can often be prepared in advance and stored.

[0263] In related embodiments, a fusion protein can be provided which adds a domain that allows one or both of the assay components to be anchored to a matrix. For example, glutathione-S-transferase/marker protein fusion proteins or glutathione-S-transferase/binding partner can be adsorbed onto glutathione sepharose beads (Sigma Chemical, St. Louis, Mo.) or glutathione derivatized microtiter plates, which are then combined with the test compound or the test compound and either the non-adsorbed marker protein or its binding partner, and the mixture incubated under conditions conducive to complex formation (e.g., physiological conditions). Following incubation, the beads or microtiter plate wells are washed to remove any unbound assay components, the immobilized complex assessed either directly or indirectly, for example, as described above. Alternatively, the complexes can be dissociated from the matrix, and the level of marker protein binding or activity determined using standard techniques.

[0264] Other techniques for immobilizing proteins on matrices can also be used in the screening assays of the invention. For example, either a marker protein or its binding partner can be immobilized utilizing conjugation of biotin and streptavidin. Biotinylated marker protein or target molecules can be prepared from biotin-NHS (N-hydroxy-succinimide) using techniques known in the art (e.g., biotinylation kit, Pierce Chemicals, Rockford, Ill.), and immobilized in the wells of streptavidin-coated 96 well plates (Pierce Chemical). In certain embodiments, the protein-immobilized surfaces can be prepared in advance and stored.

[0265] In order to conduct the assay, the corresponding partner of the immobilized assay component is exposed to the coated surface with or without the test compound. After the reaction is complete, unreacted assay components are removed (e.g., by washing) and any complexes formed will remain immobilized on the solid surface. The detection of complexes anchored on the solid surface can be accomplished in a number of ways. Where the non-immobilized component is pre-labeled, the detection of label immobilized on the surface indicates that complexes were formed. Where the non-immobilized component is not pre-labeled, an indirect label can be used to detect complexes anchored on the surface; e.g., using a labeled antibody specific for the initially non-immobilized species (the antibody, in turn, can be directly labeled or indirectly labeled with, e.g., a labeled anti-Ig antibody). Depending upon the order of addition of reaction components, test compounds which modulate (inhibit or enhance) complex formation or which disrupt preformed complexes can be detected.

[0266] In an alternate embodiment of the invention, a homogeneous assay may be used. This is typically a reaction, analogous to those mentioned above, which is conducted in a liquid phase in the presence or absence of the test compound. The formed complexes are then separated from unreacted components, and the amount of complex formed is determined. As mentioned for heterogeneous assay systems, the order of addition of reactants to the liquid phase can yield information about which test compounds modulate (inhibit or enhance) complex formation and which disrupt preformed complexes.

[0267] In such a homogeneous assay, the reaction products may be separated from unreacted assay components by any of a number of standard techniques, including but not limited to: differential centrifugation, chromatography, electrophoresis and immunoprecipitation. In differential centrifugation, complexes of molecules may be separated from uncomplexed molecules through a series of centrifugal steps, due to the different sedimentation equilibria of complexes based on their different sizes and densities (see, for example, Rivas, G., and Minton, A. P., Trends Biochem Sci 1993 August;18(8):284-7). Standard chromatographic techniques may also be utilized to separate complexed molecules from uncomplexed ones. For example, gel filtration chromatography separates molecules based on size, and through the utilization of an appropriate gel filtration resin in a column format, for example, the relatively larger complex may be separated from the relatively smaller uncomplexed components. Similarly, the relatively different charge properties of the complex as compared to the uncomplexed molecules may be exploited to differentially separate the complex from the remaining individual reactants, for example through the use of ion-exchange chromatography resins. Such resins and chromatographic techniques are well known to one skilled in the art (see, e.g., Heegaard, 1998, J Mol. Recognit. 11:141-148; Hage and Tweed, 1997, J. Chromatogr. B. Biomed. Sci. Appl., 699:499-525). Gel electrophoresis may also be employed to separate complexed molecules from unbound species (see, e.g., Ausubel et al (eds.), In: Current Protocols in Molecular Biology, J. Wiley & Sons, New York. 1999). In this technique, protein or nucleic acid complexes are separated based on size or charge, for example. In order to maintain the binding interaction during the electrophoretic process, nondenaturing gels in the absence of reducing agent are typically preferred, but conditions appropriate to the particular interactants will be well known to one skilled in the art. Immunoprecipitation is another common technique utilized for the isolation of a protein-protein complex from solution (see, e.g., Ausubel et al (eds.), In: Current Protocols in Molecular Biology, J. Wiley & Sons, New York. 1999). In this technique, all proteins binding to an antibody specific to one of the binding molecules are precipitated from solution by conjugating the antibody to a polymer bead that may be readily collected by centrifugation. The bound assay components are released from the beads (through a specific proteolysis event or other technique well known in the art which will not disturb the protein-protein interaction in the complex), and a second immunoprecipitation step is performed, this time utilizing antibodies specific for the correspondingly different interacting assay component. In this manner, only formed complexes should remain attached to the beads. Variations in complex formation in both the presence and the absence of a test compound can be compared, thus offering information about the ability of the compound to modulate interactions between the marker protein and its binding partner.

[0268] Also within the scope of the present invention are methods for direct detection of interactions between a marker protein and its natural binding partner and/or a test compound in a homogeneous or heterogeneous assay system without further sample manipulation. For example, the technique of fluorescence energy transfer may be utilized (see, e.g., Lakowicz et al, U.S. Pat. No. 5,631,169; Stavrianopoulos et al, U.S. Pat. No. 4,868,103). Generally, this technique involves the addition of a fluorophore label on a first ‘donor’ molecule (e.g., test compound) such that its emitted fluorescent energy will be absorbed by a fluorescent label on a second, ‘acceptor’ molecule (e.g., test compound), which in turn is able to fluoresce due to the absorbed energy. Alternately, the ‘donor’ protein molecule may simply utilize the natural fluorescent energy of tryptophan residues. Labels are chosen that emit different wavelengths of light, such that the ‘acceptor’ molecule label may be differentiated from that of the ‘donor’. Since the efficiency of energy transfer between the labels is related to the distance separating the molecules, spatial relationships between the molecules can be assessed. In a situation in which binding occurs between the molecules, the fluorescent emission of the ‘acceptor’ molecule label in the assay should be maximal. An FET binding event can be conveniently measured through standard fluorometric detection means well known in the art (e.g., using a fluorimeter). A test substance which either enhances or hinders participation of one of the species in the preformed complex will result in the generation of a signal variant to that of background. In this way, test substances that modulate interactions between a marker protein and its binding partner can be identified in controlled assays.

[0269] In another embodiment, modulators of marker gene expression are identified in a method wherein a cell is contacted with a candidate compound and the expression of mRNA or protein encoded by a marker gene is determined. The level of expression of mRNA or protein in the presence of the candidate compound is compared to the level of expression of mRNA or protein in the absence of the candidate compound. The candidate compound can then be identified as a modulator of marker gene expression based on this comparison. For example, when expression of marker gene mRNA or protein is greater (statistically significantly greater) in the presence of the candidate compound than in its absence, the candidate compound is identified as a stimulator of marker gene expression. Conversely, when expression of marker gene mRNA or protein is less (statistically significantly less) in the presence of the candidate compound than in its absence, the candidate compound is identified as an inhibitor of marker gene expression. The level of marker gene expression in the cells can be determined by methods described herein for detecting marker gene mRNA or protein.

[0270] In another aspect, the invention pertains to a combination of two or more of the assays described herein. For example, a modulating agent can be identified using a cell-based or a cell free assay, and the ability of the agent to modulate the activity of a marker protein can be further confirmed in vivo, e.g., in a whole animal model for cellular transformation and/or tumorigenesis.

[0271] This invention further pertains to novel agents identified by the above-described screening assays. Accordingly, it is within the scope of this invention to further use an agent identified as described herein in an appropriate animal model. For example, an agent identified as described herein (e.g., a marker gene or marker protein modulating agent, an antisense marker gene nucleic acid molecule, an marker protein specific antibody, or an marker protein binding partner) can be used in an animal model to determine the efficacy, toxicity, or side effects of treatment with such an agent. Alternatively, an agent identified as described herein can be used in an animal model to determine the mechanism of action of such an agent. Furthermore, this invention pertains to uses of novel agents identified by the above-described screening assays for treatments as described herein.

[0272] It is understood that appropriate doses of small molecule agents and protein or polypeptide agents depends upon a number of factors within the knowledge of the ordinarily skilled physician, veterinarian, or researcher. The dose(s) of these agents will vary, for example, depending upon the identity, size, and condition of the subject or sample being treated, further depending upon the route by which the composition is to be administered, if applicable, and the effect which the practitioner desires the agent to have upon the nucleic acid or polypeptide of the invention. Exemplary doses of a small molecule include milligram or microgram amounts per kilogram of subject or sample weight (e.g. about 1 microgram per kilogram to about 500 milligrams per kilogram, about 100 micrograms per kilogram to about 5 milligrams per kilogram, or about 1 microgram per kilogram to about 50 micrograms per kilogram). Exemplary doses of a protein or polypeptide include gram, milligram or microgram amounts per kilogram of subject or sample weight (e.g about 1 microgram per kilogram to about 5 grams per kilogram, about 100 micrograms per kilogram to about 500 milligrams per kilogram, or about 1 milligram per kilogram to about 50 milligrams per kilogram). It is furthermore understood that appropriate doses of one of these agents depend upon the potency of the agent with respect to the expression or activity to be modulated. Such appropriate doses can be determined using the assays described herein. When one or more of these agents is to be administered to an animal (e.g. a human) in order to modulate expression or activity of a polypeptide or nucleic acid of the invention, a physician, veterinarian, or researcher can, for example, prescribe a relatively low dose at first, subsequently increasing the dose until an appropriate response is obtained. In addition, it is understood that the specific dose level for any particular animal subject will depend upon a variety of factors including the activity of the specific agent employed, the age, body weight, general health, gender, and diet of the subject, the time of administration, the route of administration, the rate of excretion, any drug combination, and the degree of expression or activity to be modulated.

[0273] A pharmaceutical composition of the invention is formulated to be compatible with its intended route of administration. Examples of routes of administration include parenteral, e.g., intravenous, intradermal, subcutaneous, oral (e.g., inhalation), transdermal (topical), transmucosal, and rectal administration. Solutions or suspensions used for parenteral, intradermal, or subcutaneous application can include the following components: a sterile diluent such as water for injection, saline solution, fixed oils, polyethylene glycols, glycerine, propylene glycol or other synthetic solvents; antibacterial agents such as benzyl alcohol or methyl parabens; antioxidants such as ascorbic acid or sodium bisulfite; chelating agents such as ethylenediamine-tetraacetic acid; buffers such as acetates, citrates or phosphates and agents for the adjustment of tonicity such as sodium chloride or dextrose. pH can be adjusted with acids or bases, such as hydrochloric acid or sodium hydroxide. The parenteral preparation can be enclosed in ampules, disposable syringes or multiple dose vials made of glass or plastic.

[0274] Pharmaceutical compositions suitable for injectable use include sterile aqueous solutions (where water soluble) or dispersions and sterile powders for the extemporaneous preparation of sterile injectable solutions or dispersions. For intravenous administration, suitable carriers include physiological saline, bacteriostatic water, Cremophor EL (BASF; Parsippany, N.J.) or phosphate buffered saline (PBS). In all cases, the composition must be sterile and should be fluid to the extent that easy syringability exists. It must be stable under the conditions of manufacture and storage and must be preserved against the contaminating action of microorganisms such as bacteria and fungi. The carrier can be a solvent or dispersion medium containing, for example, water, ethanol, polyol (for example, glycerol, propylene glycol, and liquid polyethylene glycol, and the like), and suitable mixtures thereof. The proper fluidity can be maintained, for example, by the use of a coating such as lecithin, by the maintenance of the required particle size in the case of dispersion and by the use of surfactants. Prevention of the action of microorganisms can be achieved by various antibacterial and antifungal agents, for example, parabens, chlorobutanol, phenol, ascorbic acid, thimerosal, and the like. In many cases, it will be preferable to include isotonic agents, for example, sugars, polyalcohols such as mannitol, sorbitol, or sodium chloride in the composition. Prolonged absorption of the injectable compositions can be brought about by including in the composition an agent which delays absorption, for example, aluminum monostearate and gelatin.

[0275] Sterile injectable solutions can be prepared by incorporating the active compound (e.g., a polypeptide or antibody) in the required amount in an appropriate solvent with one or a combination of ingredients enumerated above, as required, followed by filtered sterilization. Generally, dispersions are prepared by incorporating the active compound into a sterile vehicle which contains a basic dispersion medium, and then incorporating the required other ingredients from those enumerated above. In the case of sterile powders for the preparation of sterile injectable solutions, the preferred methods of preparation are vacuum drying and freeze-drying which yields a powder of the active ingredient plus any additional desired ingredient from a previously sterile-filtered solution thereof.

[0276] Oral compositions generally include an inert diluent or an edible carrier. They can be enclosed in gelatin capsules or compressed into tablets. For the purpose of oral therapeutic administration, the active compound can be incorporated with excipients and used in the form of tablets, troches, or capsules. Oral compositions can also be prepared using a fluid carrier for use as a mouthwash, wherein the compound in the fluid carrier is applied orally and swished and expectorated or swallowed.

[0277] Pharmaceutically compatible binding agents, and/or adjuvant materials can be included as part of the composition. The tablets, pills, capsules, troches, and the like can contain any of the following ingredients, or compounds of a similar nature: a binder such as microcrystalline cellulose, gum tragacanth or gelatin; an excipient such as starch or lactose, a disintegrating agent such as alginic acid, Primogel, or corn starch; a lubricant such as magnesium stearate or Sterotes; a glidant such as colloidal silicon dioxide; a sweetening agent such as sucrose or saccharin; or a flavoring agent such as peppermint, methyl salicylate, or orange flavoring.

[0278] For administration by inhalation, the compounds are delivered in the form of an aerosol spray from a pressurized container or dispenser which contains a suitable propellant, e.g., a gas such as carbon dioxide, or a nebulizer.

[0279] Systemic administration can also be by transmucosal or transdermal means. For transmucosal or transdermal administration, penetrants appropriate to the barrier to be permeated are used in the formulation. Such penetrants are generally known in the art, and include, for example, for transmucosal administration, detergents, bile salts, and fusidic acid derivatives. Transmucosal administration can be accomplished through the use of nasal sprays or suppositories. For transdermal administration, the active compounds are formulated into ointments, salves, gels, or creams as generally known in the art.

[0280] The compounds can also be prepared in the form of suppositories (e.g., with conventional suppository bases such as cocoa butter and other glycerides) or retention enemas for rectal delivery.

[0281] In one embodiment, the active compounds are prepared with carriers that will protect the compound against rapid elimination from the body, such as a controlled release formulation, including implants and microencapsulated delivery systems. Biodegradable, biocompatible polymers can be used, such as ethylene vinyl acetate, polyanhydrides, polyglycolic acid, collagen, polyorthoesters, and polylactic acid. Methods for preparation of such formulations will be apparent to those skilled in the art. The materials can also be obtained commercially from Alza Corporation and Nova Pharmaceuticals, Inc. Liposomal suspensions (including liposomes having monoclonal antibodies incorporated therein or thereon) can also be used as pharmaceutically acceptable carriers. These can be prepared according to methods known to those skilled in the art, for example, as described in U.S. Pat. No. 4,522,811.

[0282] It is especially advantageous to formulate oral or parenteral compositions in dosage unit form for ease of administration and uniformity of dosage. Dosage unit form as used herein refers to physically discrete units suited as unitary dosages for the subject to be treated; each unit containing a predetermined quantity of active compound calculated to produce the desired therapeutic effect in association with the required pharmaceutical carrier. The specification for the dosage unit forms of the invention are dictated by and directly dependent on the unique characteristics of the active compound and the particular therapeutic effect to be achieved, and the limitations inherent in the art of compounding such an active compound for the treatment of individuals.

[0283] For antibodies, the preferred dosage is 0.1 mg/kg to 100 mg/kg of body weight (generally 10 mg/kg to 20 mg/kg). If the antibody is to act in the brain, a dosage of 50 mg/kg to 100 mg/kg is usually appropriate. Generally, partially human antibodies and fully human antibodies have a longer half-life within the human body than other antibodies. Accordingly, lower dosages and less frequent administration is often possible. Modifications such as lipidation can be used to stabilize antibodies and to enhance uptake and tissue penetration (e.g., into the breast epithelium). A method for lipidation of antibodies is described by Cruikshank et al. (1997) J. Acquired Immune Deficiency Syndromes and Human Retrovirology 14:193.

[0284] The nucleic acid molecules corresponding to a marker gene of the invention can be inserted into vectors and used as gene therapy vectors. Gene therapy vectors can be delivered to a subject by, for example, intravenous injection, local administration (U.S. Pat. No. 5,328,470), or by stereotactic injection (see, e.g., Chen et al., 1994, Proc. Natl. Acad. Sci. USA 91:3054-3057). The pharmaceutical preparation of the gene therapy vector can include the gene therapy vector in an acceptable diluent, or can comprise a slow release matrix in which the gene delivery vehicle is imbedded. Alternatively, where the complete gene delivery vector can be produced intact from recombinant cells, e.g. retroviral vectors, the pharmaceutical preparation can include one or more cells which produce the gene delivery system.

[0285] The pharmaceutical compositions can be included in a container, pack, or dispenser together with instructions for administration.

[0286] V. Computer Readable Means and Arrays

[0287] The present invention also provides computer readable media comprising the nucleic acid sequence of a marker gene of the invention and the amino acid sequence of a marker protein of the invention (hereinafter collectively “sequence information of the present invention”) . As used herein, “computer readable media” refers to any medium that can be read and accessed directly by a computer. Such media include, but are not limited to: magnetic storage media, such as floppy discs, hard disc storage medium, and magnetic tape; optical storage media such as CD-ROM; electrical storage media such as RAM and ROM; and hybrids of these categories such as magnetic/optical storage media. The skilled artisan will readily appreciate how any of the presently known computer readable mediums can be used to create a manufacture comprising computer readable medium having recorded thereon sequence information of the present invention.

[0288] As used herein, “recorded” refers to a process for storing information on computer readable medium. Those skilled in the art can readily adopt any of the presently known methods for recording information on computer readable medium to generate manufactures comprising the sequence information of the present invention.

[0289] A variety of data processor programs and formats can be used to store the sequence information of the present invention on computer readable medium. For example, the sequence information of the present invention can be represented in a word processing text file, formatted in commercially-available software such as WordPerfect and MicroSoft Word, or represented in the form of an ASCII file, stored in a database application, such as DB2, Sybase, Oracle, or the like. Any number of data processor structuring formats (e.g., text file or database) may be adapted in order to obtain computer readable medium having recorded thereon the sequence information of the present invention.

[0290] By providing the sequence information of the present invention in computer readable form, one can routinely access the sequence information for a variety of purposes. For example, one skilled in the art can use the nucleotide or amino acid sequences of a marker gene of the invention in computer readable form to compare a target sequence or target structural motif with the sequence information stored within the data storage means. Search means are used to identify fragments or regions of the marker gene or protein sequence of the invention which match a particular target sequence or target motif.

[0291] The invention also includes an array comprising the nucleotide sequence of a marker gene of the present invention. The array can be used to assay expression of one or more genes, including the marker gene, in the array. In one embodiment, the array can be used to assay gene expression in a tissue to ascertain tissue specificity of genes in the array. In this manner, up to about 7600 genes can be simultaneously assayed for expression. This allows a profile to be developed showing a battery of genes specifically expressed in one or more tissues.

[0292] In addition to such qualitative determination, the invention allows the quantitation of marker gene expression. Thus, not only tissue specificity, but also the level of expression of a battery of genes in the tissue is ascertainable. Thus, marker genes can be grouped on the basis of their tissue expression per se and level of expression in that tissue. This is useful, for example, in ascertaining the relationship of gene expression between or among tissues. Thus, one tissue can be perturbed and the effect on marker gene expression in a second tissue can be determined. In this context, the effect of one cell type on another cell type in response to a biological stimulus can be determined. Such a determination is useful, for example, to know the effect of cell-cell interaction at the level of gene expression. If an agent is administered therapeutically to treat one cell type but has an undesirable effect on another cell type, the invention provides an assay to determine the molecular basis of the undesirable effect and thus provides the opportunity to co-administer a counteracting agent or otherwise treat the undesired effect. Similarly, even within a single cell type, undesirable biological effects can be determined at the molecular level. Thus, the effects of an agent on expression of other than the target gene can be ascertained and counteracted.

[0293] In another embodiment, the array can be used to monitor the time course of expression of one or more marker genes in the array. This can occur in various biological contexts, as disclosed herein, for example in development and differentiation of breast cancer, tumor progression, progression of other diseases, in vitro processes, such a cellular transformation and senescence, autonomic neural and neurological processes, such as, for example, pain and appetite, and cognitive functions, such as learning or memory.

[0294] The array is also useful for ascertaining the effect of the expression of a marker gene on the expression of other genes in the same cell or in different cells. This provides, for example, for a selection of alternate molecular targets for therapeutic intervention if the ultimate or downstream target cannot be regulated.

[0295] The array is also useful for ascertaining differential expression patterns of one or more marker genes in normal and abnormal cells. This provides a battery of marker genes that could serve as a molecular target for diagnosis or therapeutic intervention.

[0296] VI. Predictive Medicine

[0297] The present invention pertains to the field of predictive medicine in which diagnostic assays, prognostic assays, pharmacogenomics, and monitoring clinical trails are used for prognostic (predictive) purposes to thereby treat an individual prophylactically. Accordingly, one aspect of the present invention relates to diagnostic assays for determining the level of expression of polypeptides or nucleic acids encoded by one or more marker genes of the invention, in order to determine whether an individual is at risk of developing breast cancer. Such assays can be used for prognostic or predictive purposes to thereby prophylactically treat an individual prior to the onset of the cancer.

[0298] Yet another aspect of the invention pertains to monitoring the influence of agents (e.g., drugs or other compounds administered either to inhibit breast cancer or to treat or prevent any other disorder {i.e. in order to understand any breast carcinogenic effects that such treatment may have}) on the expression or activity of a marker gene of the invention in clinical trials. These and other agents are described in further detail in the following sections.

[0299] A. Diagnostic Assays

[0300] An exemplary method for detecting the presence or absence of a polypeptide or nucleic acid encoded by a marker gene of the invention in a biological sample involves obtaining a biological sample (e.g. a biopsy of breast tissue or a lump) from a test subject and contacting the biological sample with a compound or an agent capable of detecting the polypeptide or nucleic acid (e.g., mRNA, genomic DNA, or cDNA). The detection methods of the invention can thus be used to detect mRNA, protein, cDNA, or genomic DNA, for example, in a biological sample in vitro as well as in vivo. For example, in vitro techniques for detection of mRNA include Northern hybridizations and in situ hybridizations. In vitro techniques for detection of a polypeptide encoded by a marker gene of the invention include enzyme linked immunosorbent assays (ELISAs), Western blots, immunoprecipitations, immunohistochemistry and immunofluorescence. In vitro techniques for detection of genomic DNA include Southern hybridizations. Furthermore, in vivo techniques for detection of a polypeptide encoded by a marker gene of the invention include introducing into a subject a labeled antibody directed against the polypeptide. For example, the antibody can be labeled with a radioactive marker whose presence and location in a subject can be detected by standard imaging techniques.

[0301] A general principle of such diagnostic and prognostic assays involves preparing a sample or reaction mixture that may contain a protein or nucleotide encoded by a marker gene, and a probe, under appropriate conditions and for a time sufficient to allow the protein or nucleotide and probe to interact and bind, thus forming a complex that can be removed and/or detected in the reaction mixture. These assays can be conducted in a variety of ways.

[0302] For example, one method to conduct such an assay would involve anchoring the protein or nucleotide on the one hand or probe on the other onto a solid phase support, also referred to as a substrate, and detecting complexes comprising the target marker gene or protein and the probe anchored on the solid phase at the end of the reaction. In one embodiment of such a method, a sample from a subject, which is to be assayed for presence and/or concentration of the proteins or nucleotides encoded by the marker genes, can be anchored onto a carrier or solid phase support. In another embodiment, the reverse situation is possible, in which the probe can be anchored to a solid phase and a sample from a subject can be allowed to react as an unanchored component of the assay.

[0303] There are many established methods for anchoring assay components to a solid phase. These include, without limitation, the protein or nucleotide encoded by the marker gene or probe molecules which are immobilized through conjugation of biotin and streptavidin. Such biotinylated assay components can be prepared from biotin-NHS (N-hydroxy-succinimide) using techniques known in the art (e.g., biotinylation kit, Pierce Chemicals, Rockford, Ill.), and immobilized in the wells of streptavidin-coated 96 well plates (Pierce Chemical). In certain embodiments, the surfaces with immobilized assay components can be prepared in advance and stored.

[0304] Other suitable carriers or solid phase supports for such assays include any material capable of binding the class of molecule to which the marker gene protein or nucleotide or probe belongs. Well-known supports or carriers include, but are not limited to, glass, polystyrene, nylon, polypropylene, nylon, polyethylene, dextran, amylases, natural and modified celluloses, polyacrylamides, gabbros, and magnetite.

[0305] In order to conduct assays with the above mentioned approaches, the non-immobilized component is added to the solid phase upon which the second component is anchored. After the reaction is complete, uncomplexed components may be removed (e.g., by washing) under conditions such that any complexes formed will remain immobilized upon the solid phase. The detection of complexes comprising the marker protein or nucleotide sequence and the probe anchored to the solid phase can be accomplished in a number of methods outlined herein.

[0306] In a preferred embodiment, the probe, when it is the unanchored assay component, can be labeled for the purpose of detection and readout of the assay, either directly or indirectly, with detectable labels discussed herein and which are well-known to one skilled in the art.

[0307] It is also possible to directly detect complexes comprising a marker protein or nucleotide sequence and the probe without further manipulation or labeling of either component (the marker protein or nucleotide or the probe), for example by utilizing the technique of fluorescence energy transfer (see, for example, Lakowicz et al., U.S. Pat. No. 5,631,169; Stavrianopoulos, et al., U.S. Pat. No. 4,868,103). A fluorophore label on the first, ‘donor’ molecule is selected such that, upon excitation with incident light of appropriate wavelength, its emitted fluorescent energy will be absorbed by a fluorescent label on a second ‘acceptor’ molecule, which in turn is able to fluoresce due to the absorbed energy. Alternately, the ‘donor’ protein molecule may simply utilize the natural fluorescent energy of tryptophan residues. Labels are chosen that emit different wavelengths of light, such that the ‘acceptor’ molecule label may be differentiated from that of the ‘donor’. Since the efficiency of energy transfer between the labels is related to the distance separating the molecules, spatial relationships between the molecules can be assessed. In a situation in which binding occurs between the molecules, the fluorescent emission of the ‘acceptor’ molecule label in the assay should be maximal. An FET binding event can be conveniently measured through standard fluorometric detection means well known in the art (e.g., using a fluorimeter).

[0308] In another embodiment, determination of the ability of a probe to recognize a protein or nucleotide encoded by a marker gene can be accomplished without labeling either assay component (probe or marker gene) by utilizing a technology such as real-time Biomolecular Interaction Analysis (BIA) (see, e.g., Sjolander, S. and Urbaniczky, C., 1991, Anal. Chem. 63:2338-2345 and Szabo et al., 1995, Curr. Opin. Struct. Biol. 5:699-705). As used herein, “BIA” or “surface plasmon resonance” is a technology for studying biospecific interactions in real time, without labeling any of the interactants (e.g., BIAcore). Changes in the mass at the binding surface (indicative of a binding event) result in alterations of the refractive index of light near the surface (the optical phenomenon of surface plasmon resonance (SPR)), resulting in a detectable signal which can be used as an indication of real-time reactions between biological molecules.

[0309] Alternatively, in another embodiment, analogous diagnostic and prognostic assays can be conducted with the marker protein or nucleotide and the probe as solutes in a liquid phase. In such an assay, complexes comprising the marker protein or nucleotide and the probe are separated from uncomplexed components by any of a number of standard techniques, including but not limited to: differential centrifugation, chromatography, electrophoresis and immunoprecipitation. In differential centrifugation, such complexes may be separated from uncomplexed assay components through a series of centrifugal steps, due to the different sedimentation equilibria of complexes based on their different sizes and densities (see, for example, Rivas, G., and Minton, A. P., 1993, Trends Biochem Sci. 18(8):284-7). Standard chromatographic techniques may also be utilized to separate such complexes from uncomplexed components. For example, gel filtration chromatography separates molecules based on size, and through the utilization of an appropriate gel filtration resin in a column format, for example, the relatively larger complexes may be separated from the relatively smaller uncomplexed components. Similarly, the different charge properties of such complexes as compared to the uncomplexed components may be exploited to differentiate the complexes from uncomplexed components, for example through the utilization of ion-exchange chromatography resins. Such resins and chromatographic techniques are well known to one skilled in the art (see, e.g., Heegaard, N. H., 1998, J. Mol. Recognit. Winter 11(1-6):14_; Hage, D. S., and Tweed, S. A. J. Chromatogr B Biomed Sci Appl Oct. 10, 1997 ;699(1-2):499-525). Gel electrophoresis may also be employed to separate such complexes from unbound components (see, e.g., Ausubel et al., ed., Current Protocols in Molecular Biology, John Wiley & Sons, New York, 1987-1999). In this technique, protein or nucleic acid complexes are separated based on size or charge, for example. In order to maintain the binding interaction during the electrophoretic process, non-denaturing gel matrix materials and conditions in the absence of reducing agent are typically preferred. Appropriate conditions to the particular assay and components thereof will be well known to one skilled in the art.

[0310] In a particular embodiment, the level of mRNA encoded by a marker gene can be determined both by in situ and by in vitro formats in a biological sample using methods known in the art. The term “biological sample” is intended to include tissues, cells, biological fluids and isolates thereof, isolated from a subject, as well as tissues, cells and fluids present within a subject. Many expression detection methods use isolated RNA. For in vitro methods, any RNA isolation technique that does not select against the isolation of mRNA can be utilized for the purification of RNA from breast cells (see, e.g., Ausubel et al., ed., Current Protocols in Molecular Biology, John Wiley & Sons, New York 1987-1999). Additionally, large numbers of tissue samples can readily be processed using techniques well known to those of skill in the art, such as, for example, the single-step RNA isolation process of Chomczynski (1989, U.S. Pat. No. 4,843,155).

[0311] The isolated mRNA can be used in hybridization or amplification assays that include, but are not limited to, Southern or Northern analyses, polymerase chain reaction analyses and probe arrays. One preferred diagnostic method for the detection of mRNA levels involves contacting the isolated mRNA with a nucleic acid molecule (probe) that can hybridize to the mRNA encoded by the gene being detected. The nucleic acid probe can be, for example, a full-length cDNA, or a portion thereof, such as an oligonucleotide of at least 7, 15, 30, 50, 100, 250 or 500 nucleotides in length and sufficient to specifically hybridize under stringent conditions to a mRNA encoded by a marker gene of the present invention. Other suitable probes for use in the diagnostic assays of the invention are described herein. Hybridization of a mRNA with the probe indicates that the marker gene in question is expressed.

[0312] In one format, the mRNA is immobilized on a solid surface and contacted with a probe, for example by running the isolated mRNA on an agarose gel and transferring the mRNA from the gel to a membrane, such as nitrocellulose. In an alternative format, the probe(s) are immobilized on a solid surface and the mRNA is contacted with the probe(s), for example, in an Affymetrix gene chip array. A skilled artisan can readily adapt known mRNA detection methods for use in detecting the level of mRNA encoded by the a marker gene of the present invention.

[0313] An alternative method for determining the level of mRNA encoded by a marker gene of the present invention in a sample involves the process of nucleic acid amplification, e.g., by rtPCR (the experimental embodiment set forth in Mullis, 1987, U.S. Pat. No. 4,683,202), ligase chain reaction (Barany, 1991, Proc. Natl. Acad. Sci. USA, 88:189-193), self sustained sequence replication (Guatelli et al., 1990, Proc. Natl. Acad. Sci. USA 87:1874-1878), transcriptional amplification system (Kwoh et al., 1989, Proc. Natl. Acad. Sci. USA 86:1173-1177), Q-Beta Replicase (Lizardi et al., 1988, Bio/Technology 6:1197), rolling circle replication (Lizardi et al., U.S. Pat. No. 5,854,033) or any other nucleic acid amplification method, followed by the detection of the amplified molecules using techniques well known to those of skill in the art. These detection schemes are especially useful for the detection of nucleic acid molecules if such molecules are present in very low numbers. As used herein, amplification primers are defined as being a pair of nucleic acid molecules that can anneal to 5′ or 3′ regions of a gene (plus and minus strands, respectively, or vice-versa) and contain a short region in between. In general, amplification primers are from about 10 to 30 nucleotides in length and flank a region from about 50 to 200 nucleotides in length. Under appropriate conditions and with appropriate reagents, such primers permit the amplification of a nucleic acid molecule comprising the nucleotide sequence flanked by the primers.

[0314] For in situ methods, mRNA does not need to be isolated from the breast cells prior to detection. In such methods, a cell or tissue sample is prepared/processed using known histological methods. The sample is then immobilized on a support, typically a glass slide, and then contacted with a probe that can hybridize to mRNA encoded by the marker gene.

[0315] As an alternative to making determinations based on the absolute expression level of the marker gene, determinations may be based on the normalized expression level of the marker gene. Expression levels are normalized by correcting the absolute expression level of a marker gene by comparing its expression to the expression of a gene that is not a marker gene, e.g., a housekeeping gene that is constitutively expressed. Suitable genes for normalization include housekeeping genes such as the actin gene, or epithelial cell-specific genes. This normalization allows the comparison of the expression level in one sample, e.g., a patient sample, to another sample, e.g., a non-breast cancer sample, or between samples from different sources.

[0316] Alternatively, the expression level can be provided as a relative expression level. To determine a relative expression level of a marker gene, the level of expression of the marker gene is determined for 10 or more samples of normal versus cancer cell isolates, preferably 50 or more samples, prior to the determination of the expression level for the sample in question. The mean expression level of each of the genes assayed in the larger number of samples is determined and this is used as a baseline expression level for the marker gene. The expression level of the marker gene determined for the test sample (absolute level of expression) is then divided by the mean expression value obtained for that marker gene. This provides a relative expression level.

[0317] Preferably, the samples used in the baseline determination will be from breast cancer or from non-breast cancer cells of breast tissue. The choice of the cell source is dependent on the use of the relative expression level. Using expression found in normal tissues as a mean expression score aids in validating whether the marker gene assayed is breast specific (versus normal cells). In addition, as more data is accumulated, the mean expression value can be revised, providing improved relative expression values based on accumulated data. Expression data from breast cells provides a means for grading the severity of the breast cancer state.

[0318] In another embodiment of the present invention, a polypeptide encoded by a marker gene is detected. A preferred agent for detecting a polypeptide of the invention is an antibody capable of binding to a polypeptide encoded by a marker gene of the invention, preferably an antibody with a detectable label. Antibodies can be polyclonal, or more preferably, monoclonal. An intact antibody, or a fragment thereof (e.g., Fab or F(ab′)₂) can be used. The term “labeled”, with regard to the probe or antibody, is intended to encompass direct labeling of the probe or antibody by coupling (i.e., physically linking) a detectable substance to the probe or antibody, as well as indirect labeling of the probe or antibody by reactivity with another reagent that is directly labeled. Examples of indirect labeling include detection of a primary antibody using a fluorescently labeled secondary antibody and end-labeling of a DNA probe with biotin such that it can be detected with fluorescently labeled streptavidin.

[0319] Proteins from breast cells can be isolated using techniques that are well known to those of skill in the art. The protein isolation methods employed can, for example, be such as those described in Harlow and Lane (Harlow and Lane, 1988, Antibodies: A Laboratory Manual, Cold Spring Harbor Laboratory Press, Cold Spring Harbor, N.Y.).

[0320] A variety of formats can be employed to determine whether a sample contains a protein that binds to a given antibody. Examples of such formats include, but are not limited to, enzyme immunoassay (EIA), radioimmunoassay (RIA), Western blot analysis, immunohistochemistry and enzyme linked immunoabsorbant assay (ELISA). A skilled artisan can readily adapt known protein/antibody detection methods for use in determining whether breast cells express a marker gene of the present invention.

[0321] In one format, antibodies, or antibody fragments, can be used in methods such as Western blots, immunohistochemistry or immunofluorescence techniques to detect the expressed proteins. In such uses, it is generally preferable to immobilize either the antibody, proteins, or cells containing proteins, on a solid support. Well-known supports or carriers include glass, polystyrene, polypropylene, polyethylene, dextran, nylon, amylases, natural and modified celluloses, polyacrylamides, gabbros, and magnetite.

[0322] One skilled in the art will know many other suitable carriers for binding antibody or antigen, and will be able to adapt such support for use with the present invention. For example, protein isolated from breast cells can be run on a polyacrylamide gel electrophoresis and immobilized onto a solid phase support such as nitrocellulose. The support can then be washed with suitable buffers followed by treatment with the detectably labeled antibody. The solid phase support can then be washed with the buffer a second time to remove unbound antibody. The amount of bound label on the solid support can then be detected by conventional means.

[0323] The invention also encompasses kits for detecting the presence of a polypeptide or nucleic acid encoded by a marker gene of the invention in a biological sample (e.g. a breast-associated body fluid). Such kits can be used to determine if a subject is suffering from or is at increased risk of developing breast cancer. For example, the kit can comprise a labeled compound or agent capable of detecting a polypeptide or an mRNA encoding a polypeptide encoded by a marker gene of the invention in a biological sample and means for determining the amount of the polypeptide or mRNA in the sample (e.g., an antibody which binds the polypeptide or an oligonucleotide probe which binds to DNA or mRNA encoding the polypeptide). Kits can also include instructions for interpreting the results obtained using the kit.

[0324] For antibody-based kits, the kit can comprise, for example: (1) a first antibody (e.g., attached to a solid support) which binds to a polypeptide corresponding to a marker gene of the invention; and, optionally, (2) a second, different antibody which binds to either the polypeptide or the first antibody and is conjugated to a detectable label.

[0325] For oligonucleotide-based kits, the kit can comprise, for example: (1) an oligonucleotide, e.g., a detectably labeled oligonucleotide, which hybridizes to a nucleic acid sequence encoding a polypeptide encoded by a marker gene of the invention or (2) a pair of primers useful for amplifying a nucleic acid molecule encoded by a marker gene of the invention. The kit can also comprise, e.g., a buffering agent, a preservative, or a protein stabilizing agent. The kit can further comprise components necessary for detecting the detectable label (e.g., an enzyme or a substrate). The kit can also contain a control sample or a series of control samples which can be assayed and compared to the test sample. Each component of the kit can be enclosed within an individual container and all of the various containers can be within a single package, along with instructions for interpreting the results of the assays performed using the kit.

[0326] B. Pharmacogenomics

[0327] Agents or modulators which have a stimulatory or inhibitory effect on expression of a marker gene of the invention can be administered to individuals to treat (prophylactically or therapeutically) breast cancer in the patient. In conjunction with such treatment, the pharmacogenomics (i.e., the study of the relationship between an individual's genotype and that individual's response to a foreign compound or drug) of the individual may be considered. Differences in metabolism of therapeutics can lead to severe toxicity or therapeutic failure by altering the relation between dose and blood concentration of the pharmacologically active drug. Thus, the pharmacogenomics of the individual permits the selection of effective agents (e.g., drugs) for prophylactic or therapeutic treatments based on a consideration of the individual's genotype. Such pharmacogenomics can further be used to determine appropriate dosages and therapeutic regimens. Accordingly, the level of expression of a marker gene of the invention in an individual can be determined to thereby select appropriate agent(s) for therapeutic or prophylactic treatment of the individual.

[0328] Pharmacogenomics deals with clinically significant variations in the response to drugs due to altered drug disposition and abnormal action in affected persons. See, e.g., Linder (1997) Clin. Chem. 43(2):254-266. In general, two types of pharmacogenetic conditions can be differentiated. Genetic conditions transmitted as a single factor altering the way drugs act on the body are referred to as “altered drug action.” Genetic conditions transmitted as single factors altering the way the body acts on drugs are referred to as “altered drug metabolism”. These pharmacogenetic conditions can occur either as rare defects or as polymorphisms. For example, glucose-6-phosphate dehydrogenase (G6PD) deficiency is a common inherited enzymopathy in which the main clinical complication is hemolysis after ingestion of oxidant drugs (anti-malarials, sulfonamides, analgesics, nitrofurans) and consumption of fava beans.

[0329] As an illustrative embodiment, the activity of drug metabolizing enzymes is a major determinant of both the intensity and duration of drug action. The discovery of genetic polymorphisms of drug metabolizing enzymes (e.g., N-acetyltransferase 2 (NAT 2) and cytochrome P450 enzymes CYP2D6 and CYP2C19) has provided an explanation as to why some patients do not obtain the expected drug effects or show exaggerated drug response and serious toxicity after taking the standard and safe dose of a drug. These polymorphisms are expressed in two phenotypes in the population, the extensive metabolizer (EM) and poor metabolizer (PM). The prevalence of PM is different among different populations. For example, the gene coding for CYP2D6 is highly polymorphic and several mutations have been identified in PM, which all lead to the absence of functional CYP2D6. Poor metabolizers of CYP2D6 and CYP2C19 quite frequently experience exaggerated drug response and side effects when they receive standard doses. If a metabolite is the active therapeutic moiety, a PM will show no therapeutic response, as demonstrated for the analgesic effect of codeine mediated by its CYP2D6-formed metabolite morphine. The other extreme are the so called ultra-rapid metabolizers who do not respond to standard doses. Recently, the molecular basis of ultra-rapid metabolism has been identified to be due to CYP2D6 gene amplification.

[0330] Thus, the level of expression of a marker gene of the invention in an individual can be determined to thereby select appropriate agent(s) for therapeutic or prophylactic treatment of the individual. In addition, pharmacogenetic studies can be used to apply genotyping of polymorphic alleles encoding drug-metabolizing enzymes to the identification of an individual's drug responsiveness phenotype. This knowledge, when applied to dosing or drug selection, can avoid adverse reactions or therapeutic failure and thus enhance therapeutic or prophylactic efficiency when treating a subject with a modulator of expression of a marker gene of the invention.

[0331] This invention also provides a process for preparing a database comprising at least one of the marker genes set forth in Table 1. For example, the polynucleotide sequences are stored in a digital storage medium such that a data processing system for standardized representation of the genes that identify a breast cancer cell is compiled. The data processing system is useful to analyze gene expression between two cells by first selecting a cell suspected of being of a neoplastic phenotype or genotype and then isolating polynucleotides from the cell. The isolated polynucleotides are sequenced. The sequences from the sample are compared with, the sequence(s) present in the database using homology search techniques. Greater than 90%, more preferably greater than 95% and more preferably, greater than or equal to 97% sequence identity between the test sequence and the polynucleotides of the present invention is a positive indication that the polynucleotide has been isolated from a breast cancer cell as defined above.

[0332] In an alternative embodiment, the polynucleotides of this invention are sequenced and the information regarding sequence and in some embodiments, relative expression, is stored in any functionally relevant program, e.g., in Compare Report using the SAGE software (available though Dr. Ken Kinzler at John Hopkins University). The Compare Report provides a tabulation of the polynucleotide sequences and their abundance for the samples normalized to a defined number of polynucleotides per library (say 25,000). This is then imported into MS-ACCESS either directly or via copying the data into an Excel spreadsheet first and then from there into MS-ACCESS for additional manipulations. Other programs such as SYBASE or Oracle that permit the comparison of polynucleotide numbers could be used as alternatives to MS-ACCESS. Enhancements to the software can be designed to incorporate these additional functions. These functions consist in standard Boolean, algebraic, and text search operations, applied in various combinations to reduce a large input set of polynucleotides to a manageable subset of a polynucleotide of specifically defined interest.

[0333] One skilled in the art may create groups containing one or more project(s) by combining the counts of specific polynucleotides within a group (e.g., GroupNormal=Normal1+Normal2, GroupTumor1+TumorCellLine). Additional characteristic values are also calculated for each tag in the group (e.g., average count, minimum count, maximum count). One skilled in the art may calculate individual tag count ratios between groups, for example the ratio of the average GroupNormal count to the average GroupTumor count for each polynucleotide. A statistical measure of the significance of observed differences in tag counts between groups may be calculated.

[0334] C. Monitoring Clinical Trials

[0335] Monitoring the influence of agents (e.g., drug compounds) on the level of expression of a marker gene of the invention can be applied not only in basic drug screening, but also in clinical trials. For example, the effectiveness of an agent to affect marker gene expression can be monitored in clinical trials of subjects receiving treatment for breast cancer. In a preferred embodiment, the present invention provides a method for monitoring the effectiveness of treatment of a subject with an agent (e.g., an agonist, antagonist, peptidomimetic, protein, peptide, nucleic acid, small molecule, or other drug candidate) comprising the steps of (i) obtaining a pre-administration sample from a subject prior to administration of the agent; (ii) detecting the level of expression of one or more selected marker genes of the invention in the pre-administration sample; (iii) obtaining one or more post-administration samples from the subject; (iv) detecting the level of expression of the marker gene(s) in the post-administration samples; (v) comparing the level of expression of the marker gene(s) in the pre-administration sample with the level of expression of the marker gene(s) in the post-administration sample or samples; and (vi) altering the administration of the agent to the subject accordingly. For example, increased administration of the agent can be desirable to increase expression of the marker gene(s) to higher levels than detected, i.e., to increase the effectiveness of the agent. Alternatively, decreased administration of the agent can be desirable to decrease expression of the marker gene(s) to lower levels than detected, i.e., to decrease the effectiveness of the agent.

[0336] D. Surrogate Marker Genes

[0337] The marker genes of the invention may serve as surrogate marker genes for one or more disorders or disease states or for conditions leading up to disease states, and in particular, breast cancer. As used herein, a “surrogate marker gene” is an objective biochemical marker gene which correlates with the absence or presence of a disease or disorder, or with the progression of a disease or disorder (e.g., with the presence or absence of a tumor). The presence or quantity of such marker genes is independent of the disease. Therefore, these marker genes may serve to indicate whether a particular course of treatment is effective in lessening a disease state or disorder. Surrogate marker genes are of particular use when the presence or extent of a disease state or disorder is difficult to assess through standard methodologies (e.g., early stage tumors), or when an assessment of disease progression is desired before a potentially dangerous clinical endpoint is reached (e.g., an assessment of cardiovascular disease may be made using cholesterol levels as a surrogate marker gene, and an analysis of HIV infection may be made using HIV RNA levels as a surrogate marker gene, well in advance of the undesirable clinical outcomes of myocardial infarction or fully-developed AIDS). Examples of the use of surrogate marker genes in the art include: Koomen et al. (2000) J. Mass. Spectrom. 35: 258-264; and James (1994) AIDS Treatment News Archive 209.

[0338] The marker genes of the invention are also useful as pharmacodynamic marker genes. As used herein, a “pharmacodynamic marker gene” is an objective biochemical marker gene whose expression correlates specifically with drug effects. The presence or quantity of expression of a pharmacodynamic marker gene is not related to the disease state or disorder for which the drug is being administered; therefore, the presence or quantity of the marker gene expresson is indicative of the presence or activity of the drug in a subject. For example, expression of a pharmacodynamic marker gene may be indicative of the concentration of the drug in a biological tissue, in that the marker gene is either expressed or transcribed or not expressed or transcribed in that tissue in relationship to the level of the drug. In this fashion, the distribution or uptake of the drug may be monitored by assessing expression of the pharmacodynamic marker gene. Similarly, the presence or quantity of expression of the pharmacodynamic marker gene may be related to the presence or quantity of the metabolic product of a drug, such that the presence or quantity of the marker gene expression is indicative of the relative breakdown rate of the drug in vivo. Pharmacodynamic marker genes are of particular use in increasing the sensitivity of detection of drug effects, particularly when the drug is administered in low doses. Since even a small amount of a drug may be sufficient to activate multiple rounds of marker gene transcription or expression, the amplified marker gene may be in a quantity which is more readily detectable than the drug itself. Also, expression of the marker gene may be more easily detected due to the nature of the marker gene itself, for example, using the methods described herein, antibodies may be employed in an immune-based detection system for a protein encoded by a marker gene, or marker gene-specific radiolabeled probes may be used to detect a mRNA encoded by a marker gene. Furthermore, the use of a pharmacodynamic marker gene may offer mechanism-based prediction of risk due to drug treatment beyond the range of possible direct observations. Examples of the use of pharmacodynamic marker genes in the art include: Matsuda et al. U.S. Pat. No. 6,033,862; Hattis et al. (1991) Env. Health Perspect. 90: 229-238; Schentag (1999) Am. J. Health-Syst. Pharm. 56 Suppl. 3: S21-S24; and Nicolau (1999) Am, J. Health-Syst. Pharm. 56 Suppl. 3: S16-S20.

[0339] The marker genes of the invention are also useful as pharmacogenomic marker genes. As used herein, a “pharmacogenomic marker gene” is an objective biochemical marker gene whose expression correlates with a specific clinical drug response or susceptibility in a subject (see, e.g., McLeod et al. (1999) Eur. J. Cancer 35(12): 1650-1652). The presence or quantity of expression of the phannacogenomic marker gene is related to the predicted response of the subject to a specific drug or class of drugs prior to administration of the drug. By assessing the presence or quantity of expression of one or more pharmacogenomic marker genes in a subject, a drug therapy which is most appropriate for the subject, or which is predicted to have a greater degree of success, may be selected. For example, based on the presence or quantity of RNA or protein encoded by a specific tumor marker genes in a subject, a drug or course of treatment may be selected that is optimized for the treatment of the specific tumor likely to be present in the subject. Similarly, the presence or absence of a specific sequence mutation in marker gene DNA may correlate with drug response. The use of pharmacogenomic marker genes therefore permits the application of the most appropriate treatment for each subject without having to administer the therapy.

[0340] VII. Experimental Protocol

[0341] This section describes the isolation of cDNA clones of marker genes.

[0342] Subtracted libraries were generated using a PCR based method that produced cDNAs of mRNAs that are present at a higher level in one mRNA population (the tester) than in a second mRNA population (the driver). Both tester and driver mRNA populations were converted into cDNA by reverse transcription, and then PCR amplified using the SMART PCR kit from Clontech. Tester and driver cDNAs were then hybridized using the PCR-Select cDNA subtraction kit from Clontech. This technique effected both a subtraction and normalization of the cDNA. Normalization approximately equalizes the copy numbers of low-abundance and high-abundance cDNA species. After generation of the subtracted libraries from the subtracted and normalized cDNA, 96 or more cDNA clones from each library were tested to confirm differential expression by reverse Southern hybridization.

[0343] Various subtracted libraries were constructed to isolated cDNA clones of different breast cancer marker genes. For isolating cDNA clones of genes expressed at high levels in aggressive or metastatic breast tumors, the subtracted libraries were constructed using tester cDNA generated from breast tumor tissues of patients having poor clinical outcome or aggressive tumors, or from cell lines derived from aggressive breast tumors, and driver cDNA generated from breast tumor tissues of patients having good clinical outcome or indolent tumors, or from cell lines derived from indolent breast tumors. “Poor clinical outcome” is a situation where the patient suffered cancer relapse within five years following breast cancer surgery. “Good clinical outcome” is a situation where the patient remained cancer free for over five years following breast cancer surgery. For isolating cDNA clones of genes expressed at high levels in non-aggressive or indolent breast tumors, the subtracted libraries were constructed using tester cDNA generated from breast tumor tissues of patients having good clinical outcome or indolent tumors, or from cell lines derived from indolent breast tumors, and driver cDNA generated from breast tumor tissues of patients having poor clinical outcome or having aggressive breast tumors, or from cell lines derived from aggressive breast tumors.

[0344] In Situ Hybridization Methods

[0345] Tissue microarrays (TMAs) were constructed using 4 punches of formalin-fixed and paraffin-embedded tumor samples, arrayed on a total of 5 slides. The TMAs were cut and 4 micron thick sections were put onto glass slides. Probes were constructed for radioactive in situ hybridization (ISH) by designing 26mer oligos (flanked with T7 RNA polymerase sequence for transcription) to the 3′ and 5′ ends of the subtractive library clone insert and generating a template via polymerase chain reaction (PCR). Hybridizations were performed with single-stranded 35S-radiolabeled (5×10⁷ cpm/mL) cRNA probes using the PCR-generated insert as a template. ISH was performed according to the methods in Uncan LM , et.al., Melastatin expression and prognosis in cutaneous malignant melanoma. J. Clin Oncol. (2001) Jan 15;19(2):568-76, which is incorporated herein by reference.

[0346] In the poor outcome ISH results, 20 out of 40 poor outcome IDC T1-2N0 tumors tested expressed the marker gene 1041, while in the poor outcome TP results, 6 out of 16 poor outcome IDC T1-2N0 tumors tested expressed the marker gene 1041. In the good outcome ISH results, 9 out of 40 good outcome IDC T1-2N0 tumors tested expressed the marker gene 1041, while in the good outcome TP results, 1 out of 22 good outcome IDC T1-2N0 tumors tested expressed the marker gene 1041. This data suggests that expression of marker gene 1041 is associated with poor clinical outcome.

[0347] Summary of the Marker Genes

[0348] Table 1 lists 1417 marker genes of the invention. All these marker genes may be used to diagnose breast cancer. Specifically, breast cancers may be diagnosed by examining a patient for over-expression of one or more of these marker genes. The isolation of cDNA clones of these marker genes and certain particular use of these marker genes are further described below.

[0349] The cDNA clones of marker genes 1-48 were isolated from subtracted libraries using cDNA from aggressive breast tumor cell lines SKBR-3, HS578T, BT549, MDA321 and MDA435 as the tester, and cDNA from indolent breast tumor cell lines MCF-7, T47D, ZR75 as the driver. These marker genes may be particularly useful in diagnosing aggressive breast tumors. Specifically, aggressive breast tumors may be detected by examining a patient for over-expression of any of these marker genes, more preferably marker genes 31-41, and most preferably marker genes 1-30.

[0350] The cDNA clones of marker genes 49-112 were isolated from subtracted libraries using cDNA from indolent breast tumor cell lines MCF-7, T47D, ZR75 as the tester and cDNA from aggressive breast tumor cell lines SKBR-3, HS578T, BT549, MDA321, MDA435 as the driver. These marker genes may be particularly useful in diagnosing indolent breast tumors. Specifically, indolent breast tumors may be detected by examining a patient for over-expression of any of these marker genes, more preferably marker genes 62-101, and most preferably marker genes 49-60.

[0351] The cDNA clones of marker genes 113-394 were isolated from subtracted libraries using cDNA from breast tumor tissues of patients having poor clinical outcome as the tester and cDNA from tumor tissues of patients having good clinical outcome as the driver. Accordingly, these marker genes may be particularly useful in diagnosing metastatic or aggressive breast tumors or to predict cancer relapse following breast cancer surgery. Specifically, breast cancer metastasis or aggressive breast tumors can be detected, or increased chance of cancer relapse following breast cancer surgery can be predicted, by examining a patient for over-expression of any of these marker genes, preferably marker genes 132-365, more preferably marker genes 126-131 and most preferably marker genes 113-125.

[0352] The cDNA clones of marker genes 395-506 were isolated from subtracted libraries using cDNA from breast tumor tissues of patients having good clinical outcome as the tester and cDNA from breast tumor tissues of patients having poor clinical outcome as the driver source. Accordingly, these marker genes may be used to diagnose indolent tumors or to predict efficacy or success of breast cancer surgery. Specifically, indolent breast tumors can be detected or the success of breast cancer surgery can be predicted, by examining a patient for over-expression of any of these marker genes, more preferably marker genes 476-497 and most preferably marker genes 395-475.

[0353] The cDNA clones of marker genes 507-611 were isolated from subtracted libraries using cDNA from breast tumor lymph node metastatic tissues as the tester source and cDNA from indolent (colloid and tubular) breast tumor tissues as the driver source. Accordingly, these marker genes can be used to diagnose breast cancer metastasis or aggressive breast tumors. Specifically, breast cancer metastasis or aggressive breast tumors can be detected by examining a patient for over-expression of any of these marker genes, more preferably marker genes 550-603 and most preferably marker genes 507-603.

[0354] The cDNA clones of marker genes 612-767 were isolated from subtracted libraries using cDNA from indolent (colloid and tubular) breast tumor samples as the tester source and cDNA from breast tumor lymph node metastatic tissues as the driver source. Accordingly, these marker genes can be used to diagnose indolent breast tumors. Specifically, indolent breast tumors can be detected by examining a patient for over-expression of any of these marker genes, more preferably marker genes 710-762 and most preferably marker genes 612-709.

[0355] The cDNA clones of marker genes 768-1055 were isolated from subtracted libraries using cDNA from T1N1 breast tumor tissues (i.e., tissues of breast tumors 2.0 cm or less in greatest dimension with regional lymph node metastasis) as the tester source and cDNA from T1N0 breast tumor tissues (i.e., tissues of breast tumors 2.0 cm or less in greatest dimension with no regional lymph node metastasis) of patients having good clinical outcome as the driver source. Accordingly, these marker genes can be used to diagnose aggressive or metastatic breast tumors. Specifically, aggressive or metastatic breast tumors can be detected by examining a patient for over-expression of any of these marker genes, preferably marker genes 839-1029, more preferably marker genes 826-838, and most preferably marker genes 768-825.

[0356] The cDNA clones of marker genes 1056-1417 were isolated from subtracted libraries using cDNA from breast tumor tissues of patients having good clinical outcome as the tester source and cDNA from T1N1 breast tumor tissues as the drive source. Accordingly, these marker genes can be used to diagnose indolent breast tumors or predict efficacy of breast cancer surgery. Specifically, indolent breast tumors can be detected or the success of breast cancer surgery can be predicted by examining a patient for over-expression of any of these marker genes, preferably marker genes 1180-1387, more preferably marker genes 1174-1179 and most preferably marker genes 1056-1173.

[0357] Other Embodiments

[0358] Those skilled in the art will recognize, or be able to ascertain using no more than routine experimentation, many equivalents to the specific embodiments of the invention described herein. Such equivalents are intended to be encompassed by the following claims.

[0359] All publications including journal references, patents and databases are expressly incorporated by reference.

TABLE 1

| | |
|---|---|
| Sequence 1 | cMhvSF008a12 |

ACTATAGGGCGAATTGGAGNTNCCCGCGGTGGCGGCCGAGGTACCGGAGACAGGTGCAGTCCCTC
ACCTGTGAAGTGGATGCCCTTAAAGGAACCAATGAGTCCCTGGAACGCCAGATGCGTGAAATGGA
AGAGAACTTTGCCGTTGAAGCTGCTAACTACCAAGACACTATTGGCCGCCTGCAGGATGAGATTCA
GAATATGAAGGAGGAAATGGCTCGTCACCTTCGTGAATACCAAGACCTGCTCAATGTTAAGATGG
CCCTTGACATTGAGATTGCCACCTACAGGAAGCTGCTGGAAGGCGAGGAGAGCAGGATTTCTCTG
CCTCTTCCAAACTTTTCCTCCCTGAACCTGAGGGGAAACTAATCTGGATTCACTCCCTCTGGTTGAT
ACCCACTCAAAAAGGACACTTNTGATTAAGACGGTTGAAACTAGAGATGGACAGGTTATCAACNG
AAACTTNTCAGCATCACGATGACCTTGAATAAAAAATTGCACACACTCAGTGCAGCAATATATTAC
CAGCAAGGAATAAAAAGAAATCCATATCTTAAAGAAACAGCTTTCAAGTGCCTTTCTGCAGTTTTT
TCAGGAGCCGCAAGATAGATTTTGGAATAGGAAATAAGCTCTAGTTTNTTAACAACCCGACACTTC
TACAAGATTTANNAAAAAAGTTTACCAACAATAATCTAAGTTTACAGAAAAAATCTTGNGCTATA
AATACTTTTTAAAAAGGGATTTTGAATANCCATTAAAAACTGCCTTTTTTTTTTCCAGCAANGTNTT
CAACCAACTTTGGGTTCTGGTTTAATAAAATTTTTGGAAAAAA

| | |
|---|---|
| Sequence 2 | cMhvSF008c12 |

NGGCGAATTGGAGCTCCCCGCGGNGGCGGNCGAGGTACACAGTCAGTGTGGNTGNCTTGCACGAT
GATATGGAGAGCCAGCCCCTGATTGGAACCCAGTCCACAGCTATTCCTGCACCAACTGACCTGAA
GTTCACTCAGGTCACACCCACAAGCCTGAGCGCCCAGTGGCACCACCCAATGTTCAGCTCACTGGA
TATCGAGTGCGGGTGACCCCCAAGGAGAAGACCGGACCAATGAAAGAAATCAACCTTGCTCCTGA
CAGCTCATCCGTGGTTGTATCAGGACTTATGGTGGCCACCAAATATGAAGTGAGTGTCTATGCTCT
TAAGGACACTTTGACAAAGCAGACCAGCTNAAGGGAGTTGTCACCACTCTTGGAGAATGTCAGCC
CACCAAGAAAGGGCTCGTGTGACAAGATGCTTACTGGAGACCACCATCACCATTAGCTGGAGAAC
CAAGACTGAGACGATCACTGGCTTCCAAAGTTGATGCCGTTCCAANCCAATGGGCCNAGACTTCA
ATTCNANANAAACCATTAAGCCAGATGTCAGAAGCTTCCCCATTACANGTTTACAACCAGGCCCTT
GCTACAAAGAATCTACCCTGTCCCNNGGGCCGNTNTAGNAACTAGGGGGATNCCCCCNGGCCTGG
GAGGGAATTTNGATTTTNANCCTTNTTCGATTACCCGNCNANCCNTNTAGGGGGGGGGNCCCGGA
NCCCCACCTTTTNTTNCCTTTNTTGNNGGGNTNAATTTGGGGGGNTTNGGGNAAATAATGGGAATA
AANTNNTTCCNTGGNGNAAATTGNNTTCCCCTCCNATTNCNAAAAAANAAAAACCGGGGNAANAA
AAAGTANNNNGGGGGGGGCCNNANNGGCCCCCCCCCCCCCCCCCCC

| | |
|---|---|
| Sequence 3 | cMhvSF008g12 |

CCCCGCGGTGGCGGCCCGAGGTACAACAAAGCAATGTTACCTTACCATAGGCCTTAATTCAAACTT
TGATCCATTTCACTCCAATGACGGGAGTCAATGCTACCTGGGACACTTGTATTTGTAAATTCTGATT
TAGCTTATTGTAGACTTGTGCCTACTTTGTCATGAGGGTTTGACTTCTGCATTCTTCGTGGCTTTCCT
TCCTTTGGCTTAGGTTTGCTAAAGCTAGAAGATTCAATTGCTCTTTACAGACTTATGAGGAAGATA
GACTTTGTAACGCAGATGTCACTTCTCATGCCACCCTGCCCTGGTTAGCTCTTCTGGAGGAATACTG
CAGATAAGAAAAATAGTTATTTGGGAGGCTCCCTCAAGTGTGGTAGGAATTGAGACTAACACAAT
TTTGGTTAAAGTCCACTGAGGTATGAGTTTATAGAACTCCACTGTATGTATCCAGCTATACTAAAA
CATTTTGCCAAGACACTGGAGGACTCTTTCATTATCTACTGGGAAAGAATAAGACTTAGAGGCTTT
TTAATAAGTTNCTGGGATTGGGTGGGGTAAAAATCATGGAGTTAAAAAAAGACTTGGGGGGAGAA
AGGAAAACCTGTTAAANGTTACATTTAATTTTGGAATTTCNCCNCNNTTGTCAACCTTACTTACAG
GNTNCAATGGCCAAATAAAAAGTTANAAAAAGTTTGGNAGAAATGCTTTCNANGTTTTTNAAAAG
AACCAANGGACCNTNNGCCCCCTTTNNAAAAAAANANNGAACCCCCNCNCGGCCGGGNANNTNT
NTTTANNCTTTTTTTTCCCCCCCCCCCCCTGGGGGGGGGGCNCGGCNCCCCTTTTNTTCCCTTTTTG
GGGGGG

| | |
|---|---|
| Sequence 4 | cMhvSF010e04 |

CCGCGGTGGCGGCCGAGGTACTCCAGGCCGGGACTCAGGTTATCAAAAGTGCAGGAGCTCTGATC
AGCATGGACCACTTCTTCCAAAGAATTTCCCTGCTGGCCGTTTGTAGGGGTTGTGGTAATTCTATA
ACCAGTAATGTCTGGGGTGGTGCTCCTCTCCCAGGAGACTGTGAGCACTCCAGTGTCAGGGTTTGC
CTCCAGATGCAAGTTTGTTGGTGGAGACAATGGTGTCACCACTTTGTTTACAATTGGCGCATCTCTT
TCCTGTCCATCTCTCAGGACTTGGATGGTGTAGACGTATTCTACTCCTGGAGTCAAGCCGGACACA
ACGATGCTTTCTGAGTCTGAAAGTCACNTTTTCGNGGNGCCTTTCCTTCCCTGGCNTTGGNCCGAA
CCCTCGGNCCGNTTTTANAACTTAGTGGAATCCCCCGGGCTTGCAAGGAAATTCAATATCAAACCT
TATCCGATACCCGTCAACCTCNAGGGGGGGGGCCCGGTACCCAACCTTTTGTTCCCTTTAAN

| | |
|---|---|
| Sequence 5 | cMhvSF010f04 |

TTAGGGCGAATTGGAGCTCCCCGTTGTGGCGGCCGAGGTACTGTGGATATTTAAAATATCACAGTA
ACAAGATCATGCTTGTTCCTACAGTATTGCGGGCCAGACACTTAAGTGAAAGCAGAAGTGTTTGGG
TGACTTTCCTACTTAAAATTTTGGTCATATCATTTCAAAACATTTGCATCTTGGTTGGCTGCATATG
CTTTCCTATTGATCCCAAACCAAATCTTAGAATCACTTCATTTAAAATACTGAGCGGTATTGAATAC
TTCGAAGCAGAACAGGCAATGTGCAGCCCTCATTTATGAGAAAACCCTCAGGAAACTCCCAGGGT
GATGCTTGGAGAAGCTGTGAGTTGAGCTGAAGCTGGAGAACTTTCCTCCAGANCCAAANGGCTTT
AAGAAAGGAAAGGAAGAACTCTTAACCTGGGTTCTGCTTAACATCACTCCAAGTTTAANAATGGG
ATCTTGGCCAGAAAAGACCATGCCTTTGTTCCTCTGGAATTGGNAAAAGAATGATTTACTCTCCGG
GAATCTTCTCTGTCAACCTGTACCTNNCCCGCTCTAAAACTAGTTGGATCCCCCGGNCTTCNAGGA
ATTCCATATCAAACCTTATCNATACCCNNCNACCTCNANGNGGGNCCNGNTACCCANCTTTTNTT

| | |
|---|---|
| Sequence 6 | cMhvSF011c10 |

AATACGACTCACTATAGGGGCGAATTGGAGCTCCCCGCGGTGGCGGCCGAGGTACCCAGAAGTGT
CCTGGAATGGGGCCCATGAGATGGTTGTCTGAGAGAGAGCTTCTTGTCCTACATTCGGCGGGTATG
GTCTTGGCCTATGCCTTATGGGGGTGGCCCGTTGTGGGCGGTGTGGTCCGCCTAAAACCATGTTCC
TCAAAGATCATTTGTTGCCAACACTGGGTTGCTGACCAGAAGTGCCAGGAAGCTTAATACCATTTC
CAGTGTCATACCCAGGGTGGGTGACGAAAGGGGTCTTTTGAACTGTGGAAGGAACATCAAGATCT
CTGGTCCATGAAAATTGGGGTGTGGAAGGGTTACCAATTGGGGAAAGCTCGTCTGTCTTTTTCCTT
CCAATCAAGGGCTCCTCTTCTGATTATTCTTCAGGGCAATGACATAAATTGTATATTCGGTTCCCGG
TTCCAGGCCAGTAATAATAGCCTNTGTGACACCAANGGCGGGGCCCA

| | |
|---|---|
| Sequence 7 | cMhvSF013d01 |

CCTGCCGACGTACTTNTGAACAATTATCTCCTCCTGATCACTATTTCNTACTTNGCTTTAAAAANCC
AAAGTTCACAAAGAGAGGGGGAGNANNNGGGGGACTTTTATTCCAATANAAAANATGGANTAAG
TTNTANGGNAGAANNTTGTTCAGTNCGGATNNAAATCTCTATGAAAAGTAAATTCCTTGATNACTG
GTATGACTATAANTCTCTGTTATCNGATACGAGGNANAAACTGCAAGCTGACTAGCATGTTCTGAG
AATCAGCCATTCCTAAAAATTTTATAAACACNNGATACTNTANACNGGANAATGGGACCGCNCCC
AATAAACANATATTTGNGAAAAATGCATCCACA

| | |
|---|---|
| Sequence 8 | cMhvSF017c09 |

ACTCCTATAGGGCGAATTGGAGCTCCCCGCGGTGGCGGCCCGAGGTACTCATCCCTACTGTTATAG
CTGGAGAGGATTTGGGTATTGAAGCAGGGAGGGGCAGATCCCACGAATNGACTGCAGATCTGGAA
TAATAAGTAAGGGGGTAGATCTGCCCATANAGCTCACTTTAACCGGCCTATACTCCTACAAGGAAT
TGGGGTAGGGATCTTCTACTCAGCCTTGCCACAATAGAATGGCCAATGCCCTTCTAGTATGTTTGG
TGAAGGTCTTGAAGGCCCATTTCCCCCATCCACCCTGGGGGAGAAATTGAGTCCCTAAAGTCAACG
ACAAGGCTTATTGAGGCTGAGTTTGCAACAGATCCCGATCTGGGAGGTAGAAACAAAAATGACTG
AACATCTTTTTATCCCCCAATCGTTACAAAGCCTAAATAACTCTAAACGGGATGGGAGGGCAAATT
TTANGTCAAGTTGACATCCTGGAGAAAATATCCTAGGTCCTGTCTCATTCCCTAGACCGCATAACA
CTCCAACCCGTGTAAATCTCAAGGACCCTTGAAAAAGACAGTGGGTAGGGGAAGAAGGAAGGGG
AGCTAGCTTTCCAACCTACTCCACACTTGACTTCCCATANGACAACCAGTAAGTGTAANGGGCATT
TGCAAAATCAAGTGGAAAGTCCTTGGNCGCT

| | |
|---|---|
| Sequence 9 | cMhvSF021f05 |

CGAGGTACCGGAGACAGGTGCAGTCCCTCACCTGTGAAGTGGATGCCCTTAAAGGAACCAATGAG
TCCCTGGAACGCCAGATGCGTGAAATGGAAGAGAACTTTGCCGTTGAAGCTGCTAACTACCAAGA
CACTTTGGCCGCCTGCAGGATGAGATTCAGAATATGAAGGAGGAAATGGCTCGTCACCTTCGTGA
ATACCAAGACCTGCTCAATGTTAAGATGGCCCTTGACATTGAGATTGCCACCTACAGGAAGCTGCT
GGAAGGCGAGGAGAGCAGGTAGGGAACTCAGACTTGGATGCGTGAACTAATGGTGACCATTTGTT
AGGCCCTGTGCCACTGGGCTCTAAGCAGTGTCACATTTAATCTTTAGAAAGTTTCTTTGAGGTAAC
TGCTTTCCACTTTTTGTAGAGGAGGAATTTGAATTGAGAGAGAGTAAGTGACTTGCTGAAAAAGGG
TTAATCAACAGCAGAGCTGGGATTTGAACCCATAACTCTGTCAAAGCCTNCACTCCTAACTCCTGT
TCATGCTCTGTGGAGAAAATGCTTGTAGTACATATTTTAAATGTACCTT

| | |
|---|---|
| Sequence 10 | cMhvSF027h12 |

GNTCNCNNNTGNCGNAANTNTATATAGCNCTNATCTNTNCGGNANCACNTNCANGGGGGNCCCCN
GCACCNACTNTTCNTACCCTTNATNNAGGGTTANTNGCACGCTTGNCCNNNNNATGGACANACTN
TANTTNNTGAGCTCACTGGATATCGAGTGCGGGTGACCCCCAAGGANAANACCGGACCAATGAAA
GAAATCAACCTTGCTCCTGACAGCTCATCCGTGGTTGTATCAGGACTTATGGTGGCCACCAAATAT
AAANTGAGTGTCTATGCTCTTAAGGACAC

| | |
|---|---|
| Sequence 11 | cMhvSF031g09 |

GGAGCTCCCCCGCGGTGGCGGCCGAGGTACTCAGAAGTGTCCTGGAATGGGGCCCATGAGATGGT
TGTCTGAGAGAGAGCTTCTTGTCCTACATTCGGCGGGTATGGTCTTGGCCTATGCCTTATGGGGGT
GGCCGNTGTGGGCGGGTGGTCCGCCTAAAACCATGTTCCTCAAAGATCATTTGTTGCCCAACACTG
GGTTGCTTGACCAGAAGTGCCAGGAAGCTGAATACCATTTNCAGNGTCATACCCAGNGTGGGTGA
CGAAAGGGGTCNTTTGAACTGTGGAAAGGAACATCCAAGATCTCTGGTCCATGAAGATTGGGGTG
TGGAANGGTTACCAGNTGGGGAAGCTCGTCTGTCTTTTTCCTTCCA

| | |
|---|---|
| Sequence 12 | cMhvSF031g12 |

CGACTCACTATAGGGGCGAATTGGGAGCTCCCCCGCGGTGGCGGCCCGAGGTACCTGTTCGCATTG
CAGAATATAAAACTTGGTTTACACTCTATAAAAAATAACCAATATCCAAATTCAAGAGAGCTAGC
ATTCACAGAACACACAATATGGGTGTGTANCTACTGTTCACCAGCCTCAGGCTNGATTTAAACAAA
CAAACAAAAAAAAAATTTNAAAGGGATCATTCAAGATGACCGTATAATGCTTGCTGCTGTCTTTGC
AAATTAAGGTTTGCTTTTCAAGTGCATGATTTTAACATAAGGCCTGGGCTCTCTGCACCTAGTGAG
GTGTGAGGCTCTNTTGCCCACAGTNCACACTNTNACTTAACTAAGCCAGAGTTGGGNGGCATTATT
AAATTATCACTGGTNTTCTTAATAGTNAAAATGGGGGAACCCAGANGGCAGGAAATTTNCATTCC
CTATATTTGGGGCTAAACCTAAAAGAGTATATCCCTTTCAAAGAGCTTAAGTGCCT

| | |
|---|---|
| Sequence 13 | cMhvSF031g12 |

TGANGGAATTCGATATCAAAGCTTATCGGTTNCCGGCCACCTCNAGGGGGGG

| | |
|---|---|
| Sequence 14 | cMhvSF033g12 |

CGCGGTGGCGGCCGAGGTACCGGAGACAGGTGCAGTCCCTCACCTGNGAAGTGGNTGCCCTTNNA
GGNACNACTGAGTGCCTGNATNNCCNGNNTCCACCAAGAGGTGCNACCTNCAACATCATANTGCT
GGTAACTACCAAGACACTATTGGCCNGCCTGCAGGANGAGATTCANAATATGAAGGAGGAAATGG
CNCGTAANNTTTGAGNATACCNANACCTGNTTAANGGTTANANNNCCCTTGACATTGNCAATGCC
ACCTACGGGAANCTGTNGGAANGNNAGGANAGCNAGANTTTTNTGCCTNTTNCAAACTTTTCTCC
CTTGAACCTGAGGGGAAACTAATCTGGATTCACTTCCCTCNGGTTGATACCCACTCAAAAAGGACA
CTTTTGATTAAGACGGNTGAAACTAGAAGATGGACAGGGTTATCAACGAAACTTCTCAACATCAC
CGATGACCTTGAATAAAAATTGCGCACCCTCAGTGCANGCAATATATTTCCAGCAAGAATAAAAA
AGAAATTCCATATCNTAAAGAAACAGCTTTCAATGCCTTTCTGCAGTTTTTTCANGGAGCCGCAAG
ATTNATTTTGGGAATAGGGAATTNAAGCTTTTAGTTTCTTAACAAACCGACACTTCTNACCAAGAT
TTAATAAAAAAAGTTTCAACCTTAATCTTAGTTTAACAGAAAAAATCTTGGNGCTTANAATACTTT
TTAAAAAGGNATTTTTGGAATCTTATTAAAAACTGGTTTTTTTTTT

| | |
|---|---|
| Sequence 15 | cMhvSF053c06 |

CCGCGGTGGCGGCCGAGGTACGATATACGAAGACTCTGAGCTGTTTGCCTCCGATGGGTTTCCAAG
TATTTTGCCCGTTGTAAGCTCATTAAGGGCCAACTTTTACTTTCAATATGTGATTCTGCAGAATTAA
TTTAAGGAGGCGCTGATCATGCTGAGAGTATCAATCAGAAAAATGCATTTATTCACAGGTGCCAGC
AAAGTGTATTCTCCATCTGGCCTCAAAACAGATGCCCAGCCTAATTGGGCCACAAAGATCCCGTGA
AGGTGGTTTTGCTGGTTTNCAAGCCAGCTCAATAACTTGGTTTGGCAGAATCAAGGAATTAAGGAC
CTGATCAATCAAATGGGATCACACCATTATTTGTCACAATATCCCTTTTTGGTCACCATTTTGAATT
CCATTAACTGGTATACTGTCACCGTCACATNCTATCTCAATTGNAT

| | |
|---|---|
| Sequence 16 | cMhvSF053d08 |

ATTGGAGCTCNCCGCGGTGGCGGCCNAGGTCCTGTTCGATTGCAGAATATAAACTTGGTTTACCTC
TATAAAAATACCATATCAAATTCAAGAGAGCTAGCATCCAGAACACCAATATGGGTGTGTAGCTC
TGTCACCACCTAGNTTGATTTAAACAAACAAACAAAAAAAAAATTTCAAAGGGATCATTCAAAGA
TGACCCGTATAATGCTTGCTGCTGCTTTGCAGATTAAGGGTTGCTTTTCAAAGTGCATGATTTTAAC
ATAAGGCCTGGGCTCTCTGCCCTAGTGAGGTGTGAGGCTCTCTTGCCACACAGTTCACACTCTACT
TAACTAAGCCAGAGTTGGTGGCATTATTAAATTATCACTGGTCTTCTTAATAGTAAAAAATGGGGA
ACCCAGANGGCAGGAAATTTCCATTACCCTATATTGGGGCTAAACTTAAAAAGAGTATATCCACTA
TCAAGAGCTTAGTCCTCGGCCGCTCTAGAACTAAGTGGATCCCCCG

| | |
|---|---|
| Sequence 17 | cMhvSF062b03 |

TNCTATAGGGCGAATTGGAGCTCCCCGCGGTGGCGGCCGAGGTACTGTGGATATTTAAAATATCAC
AGTAACAAGATCATGCTTGTTCCTACAGTATTGCGGGCCAGACACTTAAGTGAAAGCAGAAGTGTT
TGGGTGACTTTCCTACTTAAAATTTTGGTCATATCATTTCAAAACATTTGCATCTTGGTTGGCTGCA
TATGCTTTTCCTATTGATCCCAAACCAAATCTTAGAATCACTTCATTTAAAATACTGAGCGGTATTG
AATACTTCGAAGCAGAACAGGCAATTTGCATCTTGGTTGGCTGCATATGCTTTCCTATTGATCCCA
AACCAAATCTTAGAATCACTTCATTTAAAATACTGAGCGGTATTGAATACTTCGAAAGCAGAACAG
GCAAATGTGCAGCCCTCATTTATGAAGAAAACCCTTAGGGAAACTTCCAGGGGTGATG

| | |
|---|---|
| Sequence 18 | cMhvSF063h08 |

TCCCCGCGGTGGCGGCCGAGGTACAGTCCTGATTGCATCATAATTGTGGTTTCCAACCCAGTGGAC
ATTCTTACGTATGTTACCTGNAAACTAANTGGATTACCCAAACACCGCGTGATTGGAAGNGGATGT
AATNTGGATTNTGCTCTATANCACNACCTTATGCGCTGAGAAACTTGANCATNNATCCCNCCNTGG
TNACATGGATGNANTATGGCTNAACCCAACCTANNGATNACTCNTGCTTTGACCCCTACACGAATG
TCTGAATCAGGCTTTAAACTGTTGTGCCAGTGCTTAGGCTTTG

| | |
|---|---|
| Sequence 19 | cMhvSF073c02 |

GGGCGAATTGGAGCTCCCCGCGGTGGCGGCCGAGGTACACAGTCAATGTGGTTGCCTTGCACGAT
GATATGGAGAGCCAGCCCCTGATTGGAACCCAGTCCACAGCTATTCCTGCNCCAACTGACCTGAA
GTT

| | |
|---|---|
| Sequence 20 | cMhvSF087d03 |

TTAGGGCGAATTGGAGCTCACCGCGGTGGCGGCCGAGGTACGTCACGCAGGGCAGCACGTGAGGT
CAAGGCTTGGAAACATCCACATAGATTTGGACATGCTGTTCCTGAATNTGAGCCTGCANCTCCTGG
ATTTCCTCTNCGTGGAGTTTCTTCAAAAAGGCAATCTNTTCTTGCAAAGATTCCACTTTGNGTTNAA
AGGCCAAGAACNTGCCAAAAGACCNAATTTGTNAACAATCCTGNNCTTGAAAAGAATTGNANGGT
GGTTTTCGGNTTNCTCTNTNTGAAGCATNTGNCTNCTGCAATTNCTCCCGGAGGCGCATGATGACC
TNNGNCAGGNNGNNNNGCTCNANCTCNNCNCGGGCTNTGNCGANTGGTTAGNTGGTCCACCTGCC
CGGGCGGNCGCTNGACTCTAGAACTAG

| | |
|---|---|
| Sequence 21 | cMhvSF092d08 |

CCGCGGTGGCGGCCGAGGTACANNAACTGNTTGNATANCTAGNNTNTCATNNTGNGAGGTAATAN
CANCAAANCTAANTCNNNNAAANANCTNATGTGCATTANNANTNGGTNGAATGTCANNNNAATN
NNNNNNAGTNTNGNANNNANNTNACNATCAANNTACAAAGTGNCTTGANGCCNGNNNGGCCNNN
TGCACANTGNANTGACAATNCNNGCNNCTGNNCTGANNTTNTTNANGANTCNNCTGGNATNGATN
CNCNATNNNANNTNNNTTNCCTGGCCACCACACNCAATACCTTGCTGGNATNATGGNAGNCNNCA
CGTGCCAGGATTACCGGCTACATCATNAAGTATGAGAAGCCTGGGTNTCCTCCCANAGAAGTGGT
CCCTNGGCCCCGCCCTGGTGTNACAGAGGCTACTATTACTGGCCTGGAACCGGGNAACCGAATAT
ACAATTTATGTNATTGTCCTGAANAATAATCAGAAAGAGCNAGCCCCTNATTGGAAGGAA

| | |
|---|---|
| Sequence 22 | cMhvSF100f07 |

GCGGNGGCGGCCGAGGNCCATTTNTACGGGGAGACAAAACCCNAANCCCGNGANACCCANGCAA
NNACGACGAANCGCTGNTTACNGNNAACGGGAAGNAACCGCCCNCNANAAAAAAGACAAAGAAC
CAGGCGCATANACNANANANGGGGNGGGNCCAANGCCCATNTGTNCAGGGCCCTTTTTCNGAAA
ACNGGGCACCACAANGAAAAACCCCAGCACNNGGNAGAACNGGNACAAAAAGACCAGCNGNGG
ACAGAAAACGACGGCGNCAAAAGNAAGNNGCCCAGGGNANANGANAANGGAAGGAAGGAANGG
CCGCCCAGNANNAGGGCCCAAGGNCCAAGAGGACGGGACANCGGGCAGCGAGG

| | |
|---|---|
| Sequence 23 | cMhvSF110a12 |

CGAGGTACCGGAGACAGGTGCAGTCCCTCACCTGTGAAGTGGATGCCCTTAAAGGAACCAATGAG
TCCCTGGAACGCCAGATGCGTGAAATGGAAGAGAACTTTGCCGTTGAAGCTGCTAACTACCAAGA
CACTATTGGCCGCCTGCAGGATGAGATTCAGAATATGAAGGAGGAAATGGCTCGTCACCTTCGTG
AATACCAAGACCTGCTCAATGTTAAGATGGCCCTTGACATTGAGATTGCCACCTACAGGAAGCTGC
TGGAAGGCGAGGAGAGCAGGATTTCTCTGCCTCTTCCAAACTTTTCCTCCCTGAACCTGAGGGAAA
CTAATCTGGATTCACTCCCTCTGGTTGATACCCACTCAAAAAGGACACTTCTGATTAAGACGGTTG
AAACTAGAGATGGACAGGTTATCAACGAAACTTCTCAGCATCACGATGACCTTGAATAAAAATTG
CACACACTCAGTGCAGCAATATATTACCAGCAAGAATAAAAAAGAAATCCATATCTTAAAAGAAA
CAGCTNTCAAAGTGCCTTTCTGCAGTTTTTTCAGGAGCCGCAAGATAAGATTTGGGAATANGGAAT
AAAGCTCTAGTTTCTTAACAACCGACACTCCTNCAAAGATTTANTAAAAAAAAGTTNACCAACATT
AATCTNATTTTACAAAAAAAAATCTTTGGNGCCTANAAATACCTTTTTAAAAAAGGNNTTTTTGAA
ATANCTATTNAAAACTGGTTTTTTTTTTTTTCCAAGCAAGTNTTCCAACCCAACTTGGGTTCTGGCT
TAAAAAAAANTTTTGGGAAAAAAAAAAAAAAAAAA

| | |
|---|---|
| Sequence 24 | cMhvSF112h10 |

CGAGGTACCGGAGACAGGTGCAGTCCCTCACCTGTGAAGTGGATGCCCTTAAAGGAACCAATGAG
TCCCTGGAACGCCAGATGCGTGAAATGGAAGAGAACTTTGCCGTTGAAGCTGCTAACTACCAAGA
CACTATTGGCCGCCTGCAGGATGAGATTCATAATATGAAGGAGGAAATGGCTCGTCACCTTCGTGA
ATACCAAGACCTGCTCAATGTTAAGATGGCCCTTGACATTGAGATTGCCACCTACAGGAAGCTGCT
GGAAGGCGAGGAGAGCAGGATTTCTCTGCCTCTTCCAAACTTTTCCTCCCTGAACCTGAGGGAAAC
TAATCTGGATTCACTCCCTCTGGTTGATACCCACTCAAAAAGGACACTTCTGATTAAGACGGTTGA
AACTAGAGATGGACAGGTTATCAACGAAACTTCTCANCATCACGATGACCTTGAATAAAAATTGC
ACACACTCAGTGCAGCAATATATTACCANCAAGAATAAAAAAGAAATCCATATCTTAAAAGAAAC
AGCTTTCAAGTGCCTTTTCTGCAGTTTTTTCAAGGAGCCGCAAGATANGATTTTGGAATAGGAATA
AAGCTTTTAGTTTTTTTAACAAACCCGACACTTCCTACAAGGAATTTAGAAAAAAAGGTTTTACCA
ACCATTAATCTTANGTTTTACANGAAAAAATCTTNGNGCTNAGAATTCTTTTTTAAAAAGGGTATT
TTTGGAATNCTNTTTAAAAAACCTGNTTTTTTTTTTTTTCCNGCAAGGTNTTCCAACCCAACTTTGG
GTTTTTGCTTTCAAANAAAAAAAAAAAA

| | |
|---|---|
| Sequence 25 | cMhvSF113c04 |

AGGTACTGTGGATATTTAAAATATCACAGTAACAAGATCATGCTTGTTCCTACAGTATTGCGGGCC
AGACACTTAAGTGAAAGCAGAAGTGTTTGGGTGACTTTCCTACTTAAAATTTTGGTCATATCATTT
CAAAACATTTGCATCTTGGTTGGCTGCATATGCTTTCCTATTGATCCCAAACCAAATCTTAGAATCA
CTTCATTTAAAATACTGAGCGGTATTGAATACTTCGAAGCAAGAACAAGGCAATGTGCAGCCCTCA
TTTATGAGAAAACCCTCAGGAAACTCCCAGGGTGATGCTTGGAGAAGCTGTGAGTTGAGCTGAAG
CTGGAGAACTTCCTCCAGAGCAAAGGGCTTANGAAAGGAAAAGAAGAACTCTTAAGCTGGGGTCT
GCTAACATCACTCCAGTTTAANATGGATCTTGGCAGAGAAGACATTGCCTTTGTTCCTCCTGGGAT
TGGGAAAAGAATGAATTTACTCTTCCGGGAAATNTTTCTTTTGGTCAACCCTGGTACCTTCGGGCC
CGCTTNTTNNAAACCTAAGTGGGANTCCCCCCCCGGGCTGGCCAGGGGAATTTCCAATTATCCAAA
GCCTTTTATTCGATTACCCCGCCGAACCNTCCAANGGGGGGGGGCC

| | |
|---|---|
| Sequence 26 | cMhvSF115b02 |

AGGTACAGGCTGACAGAGAAGATTCCCGAGAGTAAATCATCTTTCCAATCCAGAGGAACAAGCAT
GTCTCTCTGCCAAGATCCATCTAAACTGGAGTGATGTTAGCAGACCCAGCTTAGAGTTCTTCTTTCT
TTCTTAAGCCCTTTGCTCTGGAGGAAGTTCTCCAGCTTCAGCTCAACTCACAGCTTCTCCAAGCATC
ACCCTGGGAGTTTCCTGAGGGTTTTCTCATAAATGAGGGCTGCACATTGCCTGTTCTGCTTCGAAGT
ATTCAATACCGCTCAGTATTTTAAATGAAGTGATTCTAAGATTTGGTTTGGGATCAATAGGGAAAG
CATATGCAGCCAACCAAGATGCAAATGTTTTGAAATGATNTGACCAAAATTTTAAGTGGGGAAAA
GTCCCCCCAAACCTTNGTGTTTNAAAATAAANAGGGGGGGNGGCCCCNANTTTTTGNAAANNAAC
CAANCANNGATTNTTTGGGGGGGGGGTNANNTATAAAAAAAAAAAANCCCCNNGNNCNCNGGGG
TTAAAAAAAAAAAAAAAANNTANCCCCCCCCCCCCNCGGGGGGNNNGNNAANNNAANTTNNNAN
TTTTNNNNNCCCCCCCCCCCCCCCGGGGGGGGGGGGGGGGGGGGCCCCCCCNCTTTTTTTTT

| | |
|---|---|
| Sequence 27 | cMhvSF115c02 |

CCGGGCAGGTACACCTGTTGTCATTCAACAAGAAACCACTGGCACCCCACGCTCAGATACAGTGC
CCTCTCCCAGGGACCTGCAGTTTGTGGAAGTGACAGACGTGAAGGTCACCATCATGTGGACACCG
CCTGAGAGTGCAGTGACCGGCTACCGTGTGGATGTGATCCCCGTCAACCTGCCTGGCGAGCACGG
GCAGAGGCTGCCCATCAGCAGGAACACCTTTGCAGAAGTCACCGGGCTGTCCCCTGGGGTCACCT
ATTACTTCAAAGTCTTTGCAGTGAGCCATGGGAGGGAGAGCAAGCCTCTTGACTGCTCAACAGAC
AACCAAACTGGATGCTCCCACTAACCTCCAGTTTGGTCANTGAAACTGATTCTACTGCCCTGGGGG
GAGAAGGGACTTCCCNTGGGGCCAANAATAANANNATNCCGATTGGANNGGNGNTCTTTACNAN
AAGAGNCCCANCCCCAANCNNTCCCTGGNNCAAANNAAAAAAAAATAANNCCCCCCCCCNGNNG
GCNTGNAAANGAAATTTNNANTNTTNAANCNNNAACCNNNNCCCGGGGGGGGGGGGGGGGGGGG
GGNCCCCTTTTTTTTTTTTTTT

| | |
|---|---|
| Sequence 28 | cMhvSF115g01 |

AGGTACAGGCTGACAGAGAAGATTCCCGAGAGTAAATCATCTTTCCAATCCAGAGGAACAAGCAT
GTCTCTCTGCCAAGATCCATCTAAACTGGAGTGATGTTAGCAGACCCAGCTTAGAGTTCTTCTTTCT
TTCTTAAGCCCTTTGCTCTGGAGGAAGTTCTCCAGCTTCAGCTCAACTCACAGCTTCTCCAAGCATC
ACCCTGGGAGTTTCCTGAGGGTTTTCTCATAAATGAGGGCTGCACATTGCCTGTTCTGCTTCGAAGT
ATTCAATACCGCTCAGTATTTTAAATGAAGTGATTCTAAGATTTGGTTTGGGATCAATANGAAAGC
ATATGCAGCCCAACCAAGATGCAAATGTTTTGAAATGATNTGACCAAATTTTTAAGTAGGGAAAG
NTNNCCCCAAACNNTTGNGGTTTTTCAATTNAAGTGGNNGGGCCCCGCCCTNNTGNNAANAAAAA
AAAAACAAAAANNNTNGGGGGGGGGGNANATNATTAAAAAAAANAAAACNANCNNNNCCCNGG
NCCCCTAANAAAAAAAAAAAAAAAACCCCCCCCCCCNGGGGGGGNGGNNNNNAATNNNATTTTN
NNTNTTNNNNNCNNNNNGNNGNNGGGGGGGGGGGG

| | |
|---|---|
| Sequence 29 | cMhvSF117f12 |

AGGTACTTGGAAATGTGAGATGGCTGTGGTGCATTCCACTGGATGGGGTGGGAGTTGGGCTGACT
CGGAGTCTCAGTGATAAATACTTCGACAGGACCACTTGAGCTTGGATAGGTCTGTAAAGGTTGGCA
ATGCCACTCCCCAATGCCACGGCCATAGCAGTAGCACCGGTATCTGACACCATGCACATACTTCTC
CCATGAATCTCCAATTTGATAAAACGTCCCAGTCTCTGAATCCTGGCATTGGTCGACGGGATCACA
CTTCCACCTGCCCCGACCCTGACCGAAGCATGTACCTCGGCCGCTCTA

| | |
|---|---|
| Sequence 30 | cMhvSF117f12 |

CCTGTGTGAAAATTGTTTATCCCGCTCACAATTTCCACAACAANATTACGAGCCCGGGGAAGCCAT
AAAAGTTGTAAAAGCCCTGGGGGTGCCNTAAATTGAAGTGGAGCTAACCTCACANTTAAATTTGC
GGTTTGCGGCTTCANCTTGGCCCGCTTTTTCCANGNCGGGGGNAAAACCTTGTCCGGTGCCCCANC
CTGCAANTTAATTGAAATNNGGCCCAAACGCCCCGGGGGNAGAGGCGGGTTTGGGGTATTGGGGG
GGGTTTTNTCGGTT

| | |
|---|---|
| Sequence 31 | cMhvSF024d10 |

ATTGGAGCTCCCCGCGGTGGCGGCCGAGGTCAAGCTTTTTTTTTTTTTTTTTTTTTTTTNNNGNNNN
NTTTNTGCANNCTTNNNNANCCNCCNCNNCNAAANNGGNNGGGGNNCNTTTTNAAAAATNGNNN
NNNCANGNANGNANAAAGGNNNTTTGCNNNGNTTNNANANNGCGATNAANATANGNCCCCNCAT
CATTAAGCCNTNTNAGAANGGGGNNCATNAAAAGNNANGGGGGATTTTNTNTGGNGGGCCNCCC
NAAANNAANTTNAAGNNGGNGANTTNAAAAAANTTNTGANACANCCNGGAGACTGGACNTTNTT
NNANCCNGNCNNTGNTGCTTTTAAGGGATTTACTANCNAAGAAAAANANNCCCTGNTTCGGGACA
AAAAAATGCTCTTTTTAACATTCA

| | |
|---|---|
| Sequence 32 | cMhvSF024e05 |

NATGGAATCCTGTTGGCNCATGATNAANTAACCCTTACNGTTCAGGGTTCCTGGAACTTNTACCNG
GGCCACTCTGACGGGCCTNACCACAGGTGCCCCCTACNACATCATANGTGGANGCNCTGAANAGA
CCANCTGAAGGCANTANTGGTTCGGGAACNAGGNGTGTTACCGNTGGGCAACTCTGGCTTGAACC
AACCTACGGATGACTCGGGCTTTG

| | |
|---|---|
| Sequence 33 | cMhvSF055a10 |

GAATNGGAGCTCCACGCGCGGTGGCGGGCCGAGGTACACAGTCAGTGTGGTTTGCCTTGCACGAT
GATATGGAGAGCCAGCCCCTGATTGGAACCCAGTCCACAGCTATTCCTGCACCAACTGACCTGAA
GTTCACTCAGGTCACACCCACAAGCCTGAGCGCCCAGTGGACACCACCCAATGTTCAGCTCACTGG
ATATCGAGTGCGGGTGACCCCCAAGGAGAAGACCGGACCAATGAAAGAAATCAACCTTGCTCCTG
ACAGCTCATCNCGTGGTTGTATCANGACTTATGGTGGGCCACCAAATATGAAGTGAGTGTCTATGC
TCTTAAANGGCACTTTGACAAGCAGACCAGCTNAAGGTGGTGNCAACACTCTGGAGAAATGTAAG
CCACCCAAGAAAGGCTTGNGTNACAGATGCTCTTGAGAACCACNATCNCCATTNNCTTGGAGAAN
CAAGGACTGGNACNATTNATTGGCTTTCCAAGGTGGTTCCCGTTCCAGGCCATGGGCCCGACTTCC
AATTCCGGNGAACCCNTTTAGGCCNGAATGNTGGGAAGCTTCACCATTACAGGGTTTACCANCCA
GGCCTNTGACTTACAAGATTTACCTGTACCTTGGGCCGGTNTTANAANTTGNGGGATCCCCCGGGC
CTGCAGGGAATTNTTNTCAAGNNTTTTNGTTACNGTNNACCTTTAAGGG

| | |
|---|---|
| Sequence 34 | cMhvSF055e04 |

TCGACTACTATAGGGGCGAATTGGAGCTCCCCGCGGTGGCGGCCGAGGTACATTTGTTTATTTAAA
GCACAGGAAATGAATAAAATGCCACCTAAAAAGTATCTGCAATGAATAAATTATTTCCAGTGAAG
CACTGCAGATCCACACACACCAGTCTGCTAACCTTTACCAAGGCCATGTCCGGTGGGCTTGTGCTT
GTCCCAGTTGACTCTTCCTTGAGACCTTTCCCTTCTGTGCAATGACCACAGCATTAGAGACCAGTCC
TGCATGCGCTGGCCTTCCTCGTAGGCATGGCAGACCACGTGGATGAGCAGTGGGCTGGCATGCAG
TAGGCTTCAACAAATGGCACTTCACTGTTTCCAGTGACCCTGAAATGTTTTATGTAAGTGGGGCCT
GGGCTTTAAAGAAAAGAGCCAGGGTTCCTCAGGCTGGGCCCCTTCACTGAGGCACAGCTCCAGGA
AATACTGGTCTCAGGAGCCAGCAACTTGTCCAGGAGTTTTGAGCCCTCAGTTGAAGGAAAATGGC
CACGTGGGTGTCCTTGCAGGCAACAGTGATGTCGGTGATGGTGACAAGTANCCAGCCTAAGGAAG
GCCAATCCCACCTTGGGTGGGAATGCAAGGGCACCTAGTCCTGCTTGGAANGGGCTNGGAAGGTT
GGGGA

| | |
|---|---|
| Sequence 35 | cMhvSF094a10 |

CGGCCGAGGTACGGAGCAATCGANGAGGCATAACCACACNNGGGGTGGCTATAGGGCTGGAAAA
CGCTGAAGATGACTGCTGACACNGAGGCCAAGGATNGNAATACAGCCAGCTTGGNAAAGACATN
AAAGCAGGAGNCNCTACAAGCGAGCNGCNGCACTAAGAAACACCCAACACCNCCANGNGCCTGG
ACAGGAGGCCCCCAGCAGAAACATGCACGCATAAGCTTCAAGCNCACTCCCTAGGATGGATGANA
GANGGGCNCCCAANNAANGGANGCCCACCAGGACCCACCAGNCAGGGCCCCANG

| | |
|---|---|
| Sequence 36 | cMhvSF100c07 |

TCCCCGCGGTGGCGGCCGAGGACCCTGTTTTANCGGANACANCAAACCCACACGAGCATGCGCGC
TCCNACANGANAGNGGGCCNAACACTAANCTGAAAGCANAAGTGCGCGGGCCGACTGACCNACN
CAANAAGAAGNTCANANANNACNACANCNTTGGCATCATGGTGGGCGGCAAAGGCTTTNCTANCC
GANNCCAAACCNGNTGTGAAAAACNCTTCATGACAAAAGACGTGAGCCGGGGTCGANANCCTGN
AAGCACAACAGGCNANAGAGCGANCNCNCATGTATGANAGAACCCTCGAGGACACTCCCAGGGG
AGATGCGCCGNNNAANCTGGGAGCAGAGCAGNAGCNGGCAAACGCCCNNCAGAGCAAAGGGCTT
AAGAAAGAAA

| | |
|---|---|
| Sequence 37 | cMhvSF100f12 |

GGCCTCTAAANTGCTGNTGGTCATTNGGCTGAGTCANAAAGCCACAAATGTCTGCTGCTGTGATAT
ATAGCTTGTCAGCTTTACAAAGCGGGCCTACGCCATTCTNATCAAGAAGAATGGTTGNCACAGTAT
TNGNGAACTGCACCNCAGGTGGAGTGCTAACA

| | |
|---|---|
| Sequence 38 | cMhvSF100f12 |

CACACCATCTTTGTCTAGAATACCCTTGGGGGTGGGATCTAGCACCTGGGATTTGCTGCTGAGNTT
ATCTTTGGGAGG

| | |
|---|---|
| Sequence 39 | cMhvSF113e08 |

CGCGGTGGCGGCCGAGGTACTATGANCCNAACACCAANNGCTNCNCTGNATTGTGNGNTGGAGGT
TGAGNTGGNAACNANANCNAANTCGGATCACATAAAGAATGTANAAAAGGTTTGCCGCTCCTGTG
CTNGCCAAACCCGGNGNTATTANTGNGATGGGAACCTAAANNNNNNTGGTCAACATCATNTACCT
TTTGAACAATAANGANTCCCACATCGTCANCTTNTCTATGGTGAANCTCCGGGTGTANATTCCCTN
GCNCTGTATGATTTCATGCTTGGGATTTACACTCAGAACTTCGGGAGGGAACATCCTGNTGTATGA
CCTATNCCTNTGGGGCNAATGTGTGTGTGGACNCTCTCTCTCTGACTCCANNCNTNTTNTGGACAA
TTCTNNNAATGANGGGGTAANACTTAACCACTNCNGGTNNTNATCTAAACATTTCTATNTAACCAA
ANTCNCTNNTGGAGNTTTGTGCNATGCCTGTTGCNNGCTATATGTAANAGNCTAGAATAATAANTG
CAAAATGGATATGGCTAACTAAANATNCTTTCAAGGTTGNGTTTCNTTTTTTT

| | |
|---|---|
| Sequence 40 | cMhvSF115f01 |

AGGTACAAGCTGNCANNTAATATTNCNNANAGTNNNTNNTGNTNNNAAATCAGCANGAACNNNC
NNGNTNCNATNNNAATANNNANCNANACTGAAGNGAAGTAAAGCATCACCCANCNCACTAGTCC
ATCTNTATTTCTTACCNCCTTAACTCTAAGAGGAACTTTTTCAGCGGGTATCTCACCATCACGGAGT
TGAATCCACATTACCNTNCNNAGAGGTCCTGAGGNGGAAATCATAGGAAAAGGCTGAACATTGCC
TGTTCTGCTTCTAACAATCACAATACNGTTNNGNGGNNNTAAAAGANNGCGAGGNNNATATTTAG
CNTTGNGCNCNATNTGAAATCNANTANNGNGCAACAACCATNCCCCNCGTTTTTTAATNGAAATG
ACNACCTGCTNNGCGGGCCCNAAAAGTGNCNCGNAACATTTNGCGGTTTTCCANCGAAAANANTT
NGNNCCCCNCTTTTCCCCNNNGGAAGCGCCNTAANGAGGGGCCNNGGGGNGGTTTTTTNAANNAN
AGGGCCCCCCCNCTNCCGGGGGGGGGGTGANAAAAAANAAANANTAAACCCCCCCCCCCCCCCG
GGGGGGGGNTTTTAATNNAAAAAAAAACNCCCCCC

| | |
|---|---|
| Sequence 41 | cMhvSF023f04 |

CTCCACCGCGGTGGCCGGCCGANGTACACTCCNTGGCCATACCCTGGAATTCTTCCCTTAACA

| | |
|---|---|
| Sequence 42 | cMhvSF024a08 |

GCTCCCCGCGGTGGCGGCCGAGGTACAAGCTGTTTTTTTTTTTTTT

| | |
|---|---|
| Sequence 43 | cMhvSF087a01 |

NCTTAGGGCGAATTGGAGCTCCCCGCGGTGGCGGCCGAGGTACCACATCTNAAATGCTCTCCAGN
GTTCTGAGNCTATTATGGGAGGANCNNCCTTTGAG

| | |
|---|---|
| Sequence 44 | cMhvSF090b01 |

AGCTCCACCGCGGTGGCGGCCGAGGTACAAGCTTTTTTTTTTTTTTTTTTTTTTTTTTGTTTTTTTTTT
TTTTTTTTTTT

| | |
|---|---|
| Sequence 45 | cMhvSF093b01 |

GGCGGCCGCCCGGGCAGGTCA

| | |
|---|---|
| Sequence 46 | cMhvSF093e03 |

CTCCACCGCGGTGGCGGCCGAGGTACAAG

| | |
|---|---|
| Sequence 47 | cMhvSF100d07 |

GGCGAATTGGAGCTCCCCGCGGTGGC

| | |
|---|---|
| Sequence 48 | cMhvSF108g05 |

CCGGGCAGGTACAAGCTTTTTTTTTTTTTTTTTTTTTCTTTTTTTTTCTTTTTTTTTTTTTTTTTTTTTTT
TTTT

| | |
|---|---|
| Sequence 49 | cMhvSE006c08a2 |

GATTGGAGCTCCCCGCGGTGGCGGCCGAGGTACTTAAGTGACTACCAGGATTGGTCTTAGGCACTT
AGGAAAATGTAGAGTCTGTTATATAGCTAATAAATGTAGGATCTGTTAAATATCTGACACAGCTGA
TATAACTTGTGCTTATACACATCTGTTAGAATGAATTGGAACATCTTGCTGTTCAGGTTGTAAGCTA
CACAAATCACCCGTTGCCTAGATTCAGTTTCCATGCGCCTTAAAACTTGAATATTTAGGTATTTGTT
TATAAAAATACAACTTATTATAACTCAGAGTGTAAGGATACATGAGCCAACTGTGCAATGGTTGTT
AACAATCTAGGATGGTGCAAGGAAAAAAATTAACAGCCAAATATAAGAAAAGAGATTTGGGGCT
GTTGGATTCAGCAAGGAATGAGCATGGCTTGATTCAGTAAAAGATCATTTTTCTAAAGATTAGTGC
CTCATTCAATATGTCTCTTCTCAATCTCCTGCCTCT

| | |
|---|---|
| Sequence 50 | cMhvSE043b11a3 |

GCGACACGGGACAACACNGAGTTTTTACGCCCGGGGGAGACGCTCNACACNCACACCNAAGACGC
NCNGTGTTGTATNNAGGGTGTGCAGCGGGCCACAGGGCACCTTGNTGTAGAACAGGCCCAACAGA
CNCGCCTNGGGGAGAGTTGTGCCTACNGGAAGAGNNGGCATAGAGGCACATTGTGGGGNCGTTTG
CCCGTCTGGCACA

| | |
|---|---|
| Sequence 51 | cMhvSE043f10a3 |

NGGGGTGGGGCCGGGCCCGGAAAGGGTACCTTGGNAGCCANGGGATTANCGNTGGGGCCANCGA
ACCCCATTCATTCCAGGTTNGGGGGTTAAAAAACNTAAACCTTGGTCTTCAACGNACNGGTCNTAA
AACCCCAAGCTTCAACGGTTTCCCCTTAATTAAGTTGGGGGTGGGAAAACAAATTNCCAACCGCCT
TTGGGTGGAAAATTCTTGCTTTCACCAAAATGGGANTAGGGGAAAAGAAGCCCCGACCATTCGGA
AAGGGAATCAAAAAAAAAGCCGGAACGTTCGGCNTTATTGGAAACCGCCTTTGGGGCCCCGGCCC
ACCAAAGGCCCAAGTTTTATTCCCTTGTTGGGGNTAAAACTTTTTTTCTTGGAACAACCCTTTTCTT
GGCTTTTAAAAAAACCCCCCAAAAAAANGGGGTCCAAGAAAAAGGGGAATCCGNTTGGAANGGG
CCCCCCGCNTTTTTTCAACCNGGGTCCTTGGGTTANTTTTCGGTTACCCCNTTCGGGGGCCCGGGTT
TTCTTTAAAAAAACCTAAAGTTGGGGGAATTCCCCCCCCCCNGGGGGCCTTTGGCCAAGGGGAAA
ANTTTTCCCAAATTNTTTCCAAAAAGNCCTTTTANTTCCGGAATTANCCCCGGTTCGGAAAANCCN
TTCTNAAANGGGGGGGGGGGGGGN

| | |
|---|---|
| Sequence 52 | cMhvSE043c09a3 |

GGAACCTCCCNCCCGCGGGGGGGGCGGGCCGAAGGGTTNCCCAGCCCCCCACCCAGCCAGCCCCC
TTTGGACCANGCCTTTAAAATTNGGGGGATTGAAGTGGTTAAGGGGCCTTNTCCCTTTAAGCCATT
AAAGGGGGAAAAGGAACNGGNTTATTTAAAGCCTTGGAAGAAAAGAAATTTGGAAAAGGAAAAG
NAAATTGGGGAGGCCCCCCCAAAAGGAAGNAAATTAGGCCATTAAAATTTAACCAANGGAAAGG
GGGAAAAACCATTGGAAAAGGAAAACCAAAGGCCNCCTTTTAAAAGNAATATTTTAAACCTTTTT
CAAGNCCCTTTTCTTCCCATTTTTCNTTTGGAATGGTCTTNAAATGGAAGGGCCAAAAAAANTAAA
CCTTGGGGGCCAANGGGGACCCCNCCCCAAAGNAATTGGAAAANAAAAAGTTTTAAAATTTNAAA
AATGGGTCCNCCAAATTGGGAAAAATTTTGGAAGGTTGGCCCAATTTAAATTACCAAACCTTGGTT
TGGACCTTGGGACCTTTTTTCCCCAAAAAAACCCCCCCGGGTTGGGAATCCGGGTTTAAGNAAGNT
ATTTCAATTCCAAATGGGTTTANCCCCCGGGANGGGGGAATTTTTTNGGTTTTTCCTGGGCCCTTCA
ATTTTTATTTAAACCTTCCACCTTTTCCCATTGGTTANTTTTTTTNGGGNCCCAGGTTTNTTAGGTTA
NCCCCNTTTGGGGGNCCCGGCTTTTTTTTAANAAAACCTTTAGGGTNGGGGGAATTCCCCCCCCCN
GGGGGCCNTTTGCCAAGGGGGNAAAATTTTCCCNNANTNTTTTCAAAGGNCCNTTTTNTTTCGGGA
TTTTACCCCCCGGTTCCGGAAACCCNTTCNAAANGGGGGGGGGGGGGG

| | |
|---|---|
| Sequence 53 | cMhvSE043b09a3 |

AAAAAANTTTTTAANCCAAAGCCTTTANTTNTAGGCCAGGGGGACTTTAACCCCNTTTTTCCCTTCT
TGGCATTAAATGGAAANTTAAACTTAGGAAAAATTAACTTTTGGCAAAGGGGAGGAGGCCCAAAA
AGCTTTAAGGACCCCCCGGAAAACCAGGGACCGAAGCTTACCCTTAAAGGAAACCAGGCTTAAAA
AAGGGAAGCCACCACCCCCCGTCTTANTTGTTAGGCCAAAAAAATAAGTGGGGGGAAAGGAATTT
TATTAAGGGGTTAGGGAAGGGGCGGAACCAAAAACCTTACCCCGGAAGCCCCTTGGGTGGAANTA
AGGCCTTGGGTTTGGTCCCCAAAAGNAATTAGGGAAATTCNTTTAAGTTTCAAACCTTTTTTAAAA
ANTTTTTGGCCCCCACCCAAGNAAACCCCCTTCTTTTANTCCCCCCCANTAACCTTAAGGTTTTAAT
TTTANTCCGGAAAAACCCCATTCNGGGGCNCCTTAACNTTCAATTTTCCAAACCCCAAAATTAAGG
CCCCCNTTGGGCCCCGGTTACCCCTTNNGGGCCCCGGCTTTTNTTAAGNAAACCTTAAAGTTGGGG
GAATTCCCCCCCCCNGGGGGCCTTTGGCAAAGGGGAAAATTTTCCCGNAATTATTTCAAAAGGCCT
TTTANTTCCGGAATTACCCCCGGTTCCGGAACCCCTTCCNAAANGGGGGGGGGGGGGGCCCCCCG
GGGTTACCCCCCCAAGCCTTTTTTTGGTNTTCCCCC

| | |
|---|---|
| Sequence 54 | cMhvSE043c08a3 |

GGTTTNAACCCGTTTTNAAATGNGGACTTACTTNGTTTNGCCTGNAATNGGGAANCCTCCCCCCGC
CGGTGGGGCCNGGCCCGAAAGGTTACTTTTTTTCAAGNTTAAAATTTAAAATAAAAATGGGCCAA
NTTTGGGAAGGGANGGGGGANCAAGAANAAAGGGAACATTGGGGGGGAAGTTGAAGAACCCAA
AACAAAGGGAATCAATGGAATGGAAGAACCCAAGAAACTTTCCCTTAAGAAAGGAAGTTGGGCC
CCCGTTTGTGGAAGCCCTTGGAAAAAAGAATCCCCCTTGTAAGCCGACACCTTGGAAGCCAAGNA
AGCCTTCCCTGGTGGCCCCTCTTTTCCGGTCCCTTGGGCCCTCAACCGCCTGGTCCTGGGTTTGGGG
CTTTTTCCCCCGGAATCCCCGGTCCGTTCCCAATCCTTCTGGTTTGGGTCCCCTTGGTTTGGGTTTGG
TTTGGTTTTGGTGGGGTTTTTTTTGGAAGAAATGGGGGGGGGGTTTTTCCGGCTTCTTTTGGTTTTG
GCCCCCAANGGGTTTCCTTGGCCAAAAAAAAACCGTTNGCCTTGGAAGAAAATTTTCCTTAAGTNG
GGGAAGGGCCACCCCTTAAAAAGTTCCAAGTTGGAAAGGTNGGGGAATTAAACCTTGGGGTTNAC
CCCTTTNGGGGCCCCGCNTTCNTTAAANAAAACCTTAAAGGTGGGGGAATTNCCCCCCCCCGGGG
GGCCTTTGGCCAANGGNAAATTTTTCCGAAATTANTTCCAAAAGCCNTTTAATTCCGNAAATAANC
CCCGGTNCCGAAACCCCTTCNNAAAGGGGGGGGGGGGGGGGC

| | |
|---|---|
| Sequence 55 | cMhvSE043c07a3 |

CATTTTTCCAAAAACCCATNTTCACCTTTCAAGTTTTTCCCATTNGGGTTAAACCAATTTGGCGGGG
GGCCTTTCCNTTGGGCTTACCCAATNAAAGTTCGGCCAATTAAGTTTGGAACTGGTNGGGAAATTT
TCTTCNAAATCCTTCTTTTAACATTCTTTGGAAGCCTTGGGGTCCTGGTTTTTTATTACCACCCAAA
AACCAAAAACTAAAAATCATTCCTTGTTTACTTTTAAAACCAACCACCAAAAGTTTCCCCATTCCA
AGAAAATGGCCCTTATTATTTTGGAAGAAAACCCACCAACCGGTTGGCCCTTTCATTAAGGGGGGT
TCCAAGCCGGNAAGGGGTTAAAAAAGCCNTTCTTTCCGGGCCAAGCCGCCCGGGCTTTGGAAAAC
TTTCCCTTCCCCAAGGGGTCNTTNGGGGTAACCCTTCGGGGGCCCGGCNTTCNTTAANAAAACCTA
AGGTNGGGGAATTCCCCCCCCCGGGGGCCTTGGGCAAAGGGNAAAATTTTTCCGGAATTANTTCN
AAAAGGCCTTTTAATTCNGAAATTANCCCGGGTCCGNAAACCCTTCCGGAAAGGGGGGGGGGGGG
GGGC

| | |
|---|---|
| Sequence 56 | cMhvSE043h02a3 |

GGTTTTTNGGGGTAAAAAANAAGGGCCNGGGGGGGTAAAAGAATTTGCCCGANGTTTCCCTTTTT
ACCTTTTTTTTTTAAACCCTTTTCCCTTAATTGAAGCCAATGCCCTGGTGGTTGGGGGGTTTTGGAC
CAAGTGGAAGGGGTAAATAAATTGGACCTTGGGTTTGGGTTTGAATTGGGTAAGNAATATTTTGG
GGGCCTGGTTTAAAATTTGGTCAAGTTTCCAAGTTGGTTTTTTAAAATCCTTGGACCGCCAAGGGC
CTTTAATTTGCCGGGAAGGGAAGAAAATGGGTTTTTTCCAATTGGTTTAACCTTTAATTACCTTAAA
CCATTTTAAGGTTTCTTTTCTTAATTAAGGGGGGTNGGAATAAGNAATTTNGGGGTTCCCCAAATT
TTGGGGGGTTGGTTGGAAAGGGGAAGTTTCCAAGTTTTAATTAATTGGTTTTTNGGGGGGGAATTT
TTTTTTTTAAGGGGTTAAGGTTGGGGGGTTGGTTTTGGAAGNCCTTTTGGAAAACCGNCCTTTTTCC
TTTTAAAATAACCCCTTTCGGGGCCCCGGCCTTCCTTAANAAAAACCTTAAGGTNGGGGAATTCCC
CCCCCCNGGGGGCCTTGGCCAAGGGNAAAATTTTCCGAATTATTCCAAAAGNCCTTTTAATTCGGG
AATTANCCCCGGTNCCGAACCCCTTCCNAAANGGGGGGGGGGGGGCCCCCCCGGGTAACCCCCCA
AANCCTTTTTTTGGGTTTCCC

| | |
|---|---|
| Sequence 57 | cMhvSE043h01a3 |

AGGAAAATGTAAAGTCTGTTATATAGCTAATAAATGTAGGATCTGTTAAATATCTGACACAGCTGA
TATAACTTGTGCTTATACACATCTGTTAGAATGAATTGGAACATCTTGCTGTTCAGGTTGTAAGCTA
CACAAATCACCCGTTGCCTAGATTCAGTTTCCATGCGCCTTAAAACTTGAATATTTAGGTATTTGTT
TATAAAAATACAACTTATTATAACTCAGAGTGTAAGGATACATGAGCCAACTGTGCAATGGTTGTT
AACAATCTAGGATGGTGCAAGGAAAAAAATTAACAGCCAAATATAAGAAAAGAGATTTGGGGCT
GTTGGATTCAGCAAGGAATGAGCATGGCTTGATTCAGTAAAAGATCATTTTTCTAAAGATTAGTGC
CTCATTCAATATGTCTCTTCTCAATCTCCTGCCTCTTTTTTTAAATGCCTCTTTCTACACATATATTT
GCACATAATCTTAGAATATGATTCTGT

| | |
|---|---|
| Sequence 58 | cMhvSE043h09a3 |

CCNTTTCTTTGGGGATTCCCNAAAAAAAAAAAAAAAAATCCAGCAAGCCACAAAATGGCGAANGG
GGGTTTCTTTGGAATATTAAAGCCGCCCCGCNATTACCGTGGGAATNGGGGGTTCAACAATCCCTT
GGTTNAAATCAATGGAACTTCCCACGGCCAAAGGAACAACAAGGGAAGTTCNTTCCAAATTGGGA
ATGGCCCCTTCCCAAGGGGTATTCNTTTTTTCCAACTTCCTTTGGCCAAGGAATTTTTTTTTTTTAAT
GGTCCAAAATNCTTCTTTTTCCCGGAACCCAATTTCCTTCCCTTCNAAAAACCTTGGGTAACCCCTT
CNGGGGCCCCGGCTTTCCTTAAGAAAACCCTTAAGGTTGGGGAATTCCCCCCCCCCGGGGGGCCTT
GGCCAAGGGGNAAAATTTTTCCGGAATTAATTTCCAAAAAGCCCTTTTAANTTCCGGGNAATTTAA
CCCCCGGTTCCCGGNAACCCCCTTCCCGGAAAGGGGGGGGGGGGGGGGGGGCCCCCCCCGGGGGT
TANCCCCCCCAAAGNCCTTTTTTTTTTTGGGGTTTTTCCCCCCCTTTTTTTTAAAGGTTGGGGAAGG
GGGGGGGGTTTTTAAAAAAATTTTTGGGCCCGNCCCGNCCCTTTTTGGGGGCCGGGTTTAAAAAAT
TTCAAATTTGGGGGGTTNCCAATTTAAAGGGCCTTTGGG

| | |
|---|---|
| Sequence 59 | cMhvSE010e07a3 |

GCCGAAATTGGANCCTCCACCCGCGGTGGGCGGCCCGAAGGTACCAGCCGGCTTCATGGGAACAT
CAAAGTTCCCCGGCTTGGGAAGCCAAGGAAGAATTGGCCCACCTTACCCGCAGCCTGGCTTCCGA
GGGGACAAGGGAAAGAATCACCTTACCAACCAAATTTGTTCTGGCCTCCCAAGGGTCCTTCTTGAN
GGCAAGCAAGGCTTCTGGGGGCCTTTCTGCTTGTCCTTTGGGAGGGGTGGTTCTTTCTTGGGGTAA
GAAGGGATGGGGAAAGGGAAAGGGGACCCTTTACCCCCCCGGGCTCTTCTCCTTGACCCTACCCA
ATTAAAAAAA

| | |
|---|---|
| Sequence 60 | cMhvSE052c02a3 |

AGGTACAGAATCATATTCTAAGATTATGTGCAAATATATGTGTAGAAAGAGGCATTTAAAAAAAG
AGGCAGGAGATTGAGAAGAGACATATTGAATGAGGCACTAATCTTTAGAAAAATGATCTTTTACT
GAATCAAGCCATGCTCATTCCTTGCTGAATCCAACAGCCCCAAATCTCTTTTCTTATATTTGGCTGT
TAATTTTTTTCCTTGCACCATCCTAGATTGTTAACAACCATTGCACAGTTGGCTCATGTATCCTTAC
ACTCTGAGTTATAATAAGTTGTATTTTTATAAACAAATACCTAAATATTCAAGTTTTAAGGCGCAT
GGAAACTGAATCTAGGCAACGGGTGATTTGTGTAGCTTACAACCTGAACAGCAAGATGTTCCAA

| | |
|---|---|
| Sequence 61 | cMhvSE035d05a3 |

AGGGCGAATTGGAGCTCCCCGCGGTGGCGGCCGAGGTACTCCACGAGGAAACTACAATTCCAGGA
ACAGATTTGAAACTCTCCTACTTGAGTTCCAGAGCTGCAGGGTATAAGTCAGTTCTCAAGATCACC
ATGACCCAGTCTATTATTCCATTTAATTTAATGAAGGTTCATCTTATGGTAGCTGTAGTAGGAAGA
CTCTTCCAAAAGTGGTTTCCTGCCTCACCAAACTTGGCCTATACTTTCATATGGGATAAAACAGAT
GCATATAATCAGAAAGTCTATGGTCTATCTGAAGCTGTTGTGTCAGTTGGATATGAGTATGAGTCG
TGTTTGGACCTGACTCTGTGGGAAAAGAGGACTGCCATTCTGCAGGGCTATGAATTGGATGCCGTC
CAACATGGGTGGCTGGACATTAGATAAACATCGCGTGCTGGATGTACCTCGGCCGCTCTAGAACTA
GTGGA

| | |
|---|---|
| Sequence 62 | cMhvSE00605a2 |

GGCTAATTGGAGCTCCCCGCGGTGGCGGCCGAGGTATCTCCGGGGTGGCGCTGGGGTTGGCTCCAT
GACCAAGATCTATGGGGGACGTCAGAGAAACGGCGTCATGCCCAGCCACTTCAGCCGAGGCTCCA
AGAGTGTGGCCCGCCGGGTCCTCCAAGCCCTGGAGGGGCTGAAAATGGTGGAAAAGGACCAAGAT
GGCGGCCGAGGTCGGTAATTGATAATCTGGCACCCTGCAAGGCTAGAATGGCGATCAAACATTTT
CACTGGCTGAGACTCTCCTTCCATACTCCAGTGATAAACTGCATTATCCGTAACAAGAAGCAACCC
GTATTCAAAGAGATCCATTTCCAAAAGGTGACATCATCAGTCATGGTATGAGCCTTCATTTTACTTT
TCATTTCAATGGTTAAAAATCTGAAGAGTTTTNCCANCTTTCAAGTGCAATTTACTTTGCTAAGCCT
GGATTCATGATGGCGCCTGTCTTGGCTTGAAAATTGGGTCTT

| | |
|---|---|
| Sequence 63 | cMhvSE001e03a3 |

AGGTACACTACCTNANANTGNTTCCACNGNCNNGNCNCNNTGCTNNANNGNANGANGGNCNNTA
TNCTGTGTTTATNGCNTNGANGNTAAANGNGANAGCCNGNANTAAANGNATNCNTGNCTTTNGAN
CTATGAANCTCATNNCAAANNGATCTANNGNAANANCNNTGANGGGGNGNCCTGTNNNCNTGTN
CACCTACCTNTATGGAAAGGTNTGNTGGTNTCTTNAATTANACATGNNANTAGATGCCTGCTGGAT
AATATATAAACAATAAAAACAACTTTCACTTCTTCCTATTGTAATCGTGTGCCATGGATCTGATCTG
TACCT

| | |
|---|---|
| Sequence 64 | cMhvSE035c06a3 |

CGAGGTCGCAGCAGCTGGGGAGGAGCCAAAGCCTCGGCGCTCACCTAAGCCGCAGGGAGATACA
CCCAACTGGGAGATGAGGAAACAGCAACCCAGAGAGGAGAACTAACCCACACAGGATCATTTCGT
GAAGGAGCAAGGCTGAAGAACCAGACCTGGACTTTCTTAGGACAAACTTACTGCAGCTTGAAGGA
GCCAACCATGGATTTGAGGCGTGTGAAGGAATATTTCTCCTGGCTCTACTATCAATACCAAATCAT
TAGCTGCTGTGCTGTTTTAGAGCCCTGGGAGCGATCTATGTTTAACACCATCTTACTAACCATTATT
GCTATGGTGGGTATACACTGCCTATGTCTTTATTCCAATCCACATTCCCTGGCTTGGGAATTTTTCT
CAAAAATA

| | |
|---|---|
| Sequence 65 | cMhvSE044f03a3 |

CCGGGAGGCTCCCAGGCGCCCGGCGCAGTGGGAAGCTCGCAGCAGCTGGGGAGGAGCCAAAGCC
TCGGCGCTCACCTAAGCCGCAGGGAGATACACCCAACTGGGAGATGAGGAAACAGCAACCCAGA
GAGGAGAACTAACCCACACAGGATCATTTCGTGAAGGAGCAAGGCTGAAGAACCAGACCTGGACT
TTCTTAGGACAAACTTACTGCAGCTTGAAGGAGCCAACCATGGATTTGAGGCGTGTGAAGGAATA
TTTCTCCTGGCTCTACTATCAATACCAAATCATTAGCTGCTGTGCTGTTTTAGAGCCCTGGGAGCGA
TCTATGTTTAACACCATCTTACTAACCATTATTGCTATGGTGGTATACACTGCCTATGTCTTTATTCC
AATCCACATTCGCCTGGCTTGGGAATTTTTCTCAAAAA

| | |
|---|---|
| Sequence 66 | cMhvSE001c02a3 |

TAGGGCGAATTGGAGCTCCCCGCGGTGGCGGCCGAGGTACTCGAACANCATNCNGCAGCTGNTNN
ACAANTTCCCTCCTGACCANCTNACAAGCTNACGAGCGCCGTNNTGGTCTGGGCCCAAANGCTNT
NCACACCCNCTNACCTTTGATGTAAACAATCCCNTGNNTNTGGACTATG

| | |
|---|---|
| Sequence 67 | cMhvSE001f04a3 |

CCGGGCAGGTACCACGTGNACCACCACCGNTACCTGGGCGGNGACNGGCTGGACGTGGACGTNCC
CACACNTNTGGAGGGCTGGTTNTTCTGNACNCCCNCCCGCAAGCTGATATGGCTGGTGCTGCAGCC
CTTCTTNTACTNACTA

| | |
|---|---|
| Sequence 68 | cMhvSE001f04a3 |

ACGTACCNANCTTTTGTTNCCTTAAGNGAGGGTTAATNGCGCNCTTGGNGTAATCATGGNNANAN
CTGTNTACTGGAANTCATGACNNTGTCTGGGCTGCAAANAAGCANTGCCCNTGTGATCATTTN

| | |
|---|---|
| Sequence 69 | cMhvSE041c01a1 |

GCGAATTGGAGCTCCACCCGCGGTGGCGGCCGCCCGTGGAGGGTCAATCATGGAGATGAGCCCAA
CAAAGCACAGATTATCGATAGGGAAATTCACATCGTCAGTGTCAAACTGGAACCCTTCAGGAAAC
TGTTCATCTGGCAGAAAGAGGTGGCAGAAACCTAGGACTCGTTCTCCGAGGCCCCCCAGCTCCAA
ATAGGCGTTCTGAAAGGCGTCTTTCAGCTCCTCATCCAGGGGCTGCTCCTTGCCGTGGAGGAGGAT
AGAGCTGCAACGGTCTAGGATCCTTTCTGGGGCGCCCTTCATCACCAACAGGTGTTGGGGCTCCGA
TGTGTTGGGGTTCTTATGAATAGACAACTGGTACCTCGGCCGCCCGGGCAGGTACTTTTATCTTAA
AAGGGTGGTAGTTTTCCCTAAAATACTTATTATGTAAGGGTCATTAGACAAATGTCTTGAAGTAGA
CATGGAATTTATGAATGGTTCTTTATCATTTCTCTTCCCCCTTTTTGGCATCCTGGCTTGCCTCCAGT
TTTAGGTCCTTTAGTTTGCTTCTGTAAGCAACGGGAACACCTGCTGAGGGGGCTCTTTCCCTCATGT
ATACTTCAAGTAAGATCAAGAATCTTTTGTGAAATTATAGAAATTTACTATGTAAATGCTTGATGG
AATTTTTTCCT

| | |
|---|---|
| Sequence 70 | cMhvSE035e02a3 |

GGACCTTGTAGGGCACATACTTCCTGTAGATATGGCCCACCCTGGAGCAGGGGATGTCCTCCATGC
GGCCCCCACACATCCACACCTTGAAGGAGATTTCATACTGCTCCCCTCCCCAGATCTCCAAGCCTG
GGTCATACCCGCCGAGTTCCCAGAACCACTTCCGATCCACGGCGAACAGTCCACCGGCCATCACG
GGAGACTCAAATGGGTCGCTGGGGTCAGCTTTCTGCAGTTCTGGAGGGATCGGGATCCGCTTGTAG
TACCT

| | |
|---|---|
| Sequence 71 | cMhvSE043b06a3 |

TGGGGCNGGGCCCGAAAGGTACCTTATTGTGGAACTTTTCATTTGGATTGCCCCCCAGGGAACACC
AAGAAGAACTTTTTTCCAAAAAAACATTGGAATTACCAGGGGGGAACATTCTTCAANGGCTTGGA
ACTGGTGGCTGGTCCTGGAATTGGTTGGCTTGCCTTGGGTGGTTTGGGGTGGAAAATTTGGAAAAA
GCCTTGGGTTATTCTTCCAAAGAAAATTGGGGGCCAAGAACCCCCGNAAGAAAGCCATGCCCCTTT
CTTGGGCCTTTAACACAACTGGGGGTGGTGGAAAAACCAAACCTAAATTTGGTCCGGGTGGTTTTA
AACCAAAAAAATTGGGGAATTTTCCCACCTTGGAAGGCCCGCCCCCTTACCAAGCCCAGGGAAAA
GAAAGAAATATTTGNAAGGGGAAAAATTTGGGTTTAAAAGGGGAAAAGTTCCAAGGCCACCTTTT
TACCAATTTTTAAAAGAAAAAAAAATTTNGGGCNTTTACCCAAAACCCCCCCCGGAACCCACCNA
AGTTTAAGCCCAATTTTTTTGGTTGGNCCCCAAAAATTTTTTCCTTNGGGGTTTTGGGGGAAAATTG
GGGGGTTGGNAACCCAAAACCAATTGGNCCTTGGGGGAAAANCCCCAAAANGGGGCCAATTTGG
GTTTTAAANAAAACCCCTTTGGCCCCCCCGGGGGGGGCCCGGGGGNCCCCGGCNTTTTCTTTTAAA
NAAAAACCCTTAAAGGGTTGGGGGGAAATTCCCCCCCCCCCCGGGGGGNCCTTTTGGCCNAAGGG
GGAAAAAATTTTTNCCCNAAATTTANTTTCCNAAAAAGNCCNTTTTAATTTCCGGNAATTTANCCC
CCCGGTTTCCGGNAAACCCCCTTTCCNAAAANGGGGGGGGGGGGGGGGGCCCCC

| | |
|---|---|
| Sequence 72 | cMhvSE043h03a3 |

AGGGTGGCAAAAAAAAAAAGGGCCGTTTTGCCNTCAACAAATTGGTANCCCGAGAANTACNCCNT
CAACATTCACAAGCGCTTCCATGGAGTGGGCTTCAAGAAACCGTGCACCTCGGGCACCTCAAAGA
GATTCGGAAATTTGCCATGAAGGAGATGGGAACTCCAGATGTGCGCATTGACACCAGGCTTCAAC
AAAGCTTGTCTGGGGCCAAAGGAAATAAGGGAATGTGCCATTACCGAATCCCGTGTGCCGGCTGT
CCAGAAAACGTAATGAGGGATGAAAGATTCACCCAAATAAGCTATATTACTTTTGGTTACCTTATG
NTACCTTCGGCCCGCTCTAGAAACTTAGGTGGGATCCCCCGGGCCTGCAGGGAAATTCCGATATTC
AAGGCTTATCGATACCGTCGACCTTCNAGGGGGGGGCCCCGGTAC

| | |
|---|---|
| Sequence 73 | cMhvSE045g08a3 |

GGCNNATTGGAGCTCCCCGCGGTGGCGGCCGAGGTACCATTTGTGGTGCCCAAGTTTAAGTTATCT
TACATTCAACCCAGGACACAAGAAACTCCTTCACATCTGGAAGAACTTGAAGGATCTGCCAGAGC
ATCTTTTGGAGATCGAAAGGTAGAACTTTCCAGTTCATCCCAGCACGAACCTAGCTATGATGTGTA
TAACCCATTCTATATGTATCAGCACATTTCACCTGATTTGAGTCGACGCTTTCCTCCCCGTTCAGAA
GTGACGAGACTGTATGGATCGGTTTGTGATTTAAGGACGAACAAACTTCCCGGTTCCCCTGGGCTA
AGCAAATCTATGTTTGATCTTACAAACTCATCTCAGCGATTCATCCAGAGACATGATTCATTGTCC
AGTGTACCT

| | |
|---|---|
| Sequence 74 | cMhvSE030f02a3 |

AGGGCNAATTGGAGCTCCCCGCGGTGGCGGCCGAGGTACCACCAGAGGACACGGATAATCTTCAT
ATCTGATTCTCCTGCGGTGCGTGTGCCCTGACAGAAGAAGTTGTATTTGCCTTCCCATACTCCTGTT
ACTAACTCACAGAACATATACAGAGACAGCAGTGTGAGTCCAAGGTTATACACCACTAAAATCCC
CCGGCAAGAGAATGGCTGTTTATTCCTCATGTATTTTGGTCCCAGCCATACAATTAGTAAATATAT
GACAGAGCAGATAAATGTGGGTATATAATTGTCCAGAAGAAACCATCCTTTTACTCTAGTATCTCG
AGGGCCTAGCAATGCCTTGAAATAGGTACCT

| | |
|---|---|
| Sequence 75 | cMhvSE033d07a1 |

AGGTGTCGCCGCCGCGAAGGGAGCCGCCGCCATGTCTGCGCATCTGCAATGGATGGTCGTGCGGA
ACTGCTCCAGCTTCCTGATCAAGAGGAATAAGCAGACCTACAGCACTGAGCCCAATAACTTGAAG
GCCCGCAATTCCTTCCGCTACAACGGACTGATTCACCGCAAGACTGTGGGCGTGGAGCCGGCAGC
CGACGGCAAAGGTGTCGTGGTGGTCATTAAGCGGAGATCCGGTGAGTTTTGTCTGGTTTGGGCCAG
AGAGCGGCCCCTTTCCCGGGTCTGGGAAGCTGTGATTTTTTACTGTCAGGCAGGGAAGAGACGGTA
ACTGCCATCGCGGCGGGCCATCCCTGGGCGCCAGGGGTGTTTGGTCTGGGGTTACCTGCCCGGG

| | |
|---|---|
| Sequence 76 | cMhvSE043g02a3 |

GCGGCCGAGGTACTGNNAGGGNNAAAANNAGCTGNNNGGNNGNCANAAGTGCNTCTNCTTAAGG
ACCNNNNCCTGCTGGNATANAGNACNNAAACCTANNACCNTGGANTGNNGANTANCNTNANNGG
ANTACGGNCAAANGNNGGCCTGCGGCTGCTGAACTACCATTACTTCACTGGTGTCAGATGGGGAG
ACGNNGGCACGTAATGGGCATANNCNTCCTTNNNGGCNAATCTGCAAGCGTGGAAGGCANCNTGT
NACTGANGCCTTCNACTTNCACTTNTAACCTTGGAGCTNACTGNTTNCTGCCTNTGGGGNTTTTNT
NAAGAAACCNACCCACTGTGATCAATATTGGAGANAAANTGNACATTCTTGGGCTGAANACNGGC
CTCNNACACTGNTNACACTNGNCTNTGANNCNNCAGTACCT

| | |
|---|---|
| Sequence 77 | cMhvSE030b01a3 |

NAATTGGAGCTCCCCGCGGTGGCGGCCGATGTACATNTNTCNGNNANGGNCNGNTGNAGNAANAC
CNTANCAATCCTATCCATNCCGNTGACNNTGNGNGGGGGNNCAAAACCCAANTGCTGNTGCCTCT
NCCNNGCCNTNANTGNAACACTCAGCGAAANTCATGGTTCATAANTGAAACNTGAATTCCTCTAG
ACTCTGCAATACTGCACTCTTAACAAAAATCAAATGAAAACAAGACGTGTCTGCCACAGGTCTCA
GGGTAACAGATGCCCTGTCCACTGAGAGCGGCAGTTCTGCAGTCAGAGTTCTTTGATCAGCCCTGG
ACCCATTTATCACATGGGGGAGGAA

| | |
|---|---|
| Sequence 78 | cMhvSE040a01a3 |

ACTCCCCGCGGTGGCGGCCGCCCGNGCAGGTACAAAGCTTTTTTTTTTTTTTTTTTTTTTTTNNNAA
TTTTTTTTTTTTTTTTTTTTTTTTTTTTTTTTTTTTTTTTTTTTTTTTTTTTTTTTTTTTTTTTTTTTTTTTT
TNAAAAAAAAAAAAAAANNNTTTTTTTTTTTTTTTTTAAAAAAAAAAAAAAAAAAAACCCCCCNC
AAAAAAAAAAAAAAAAANNCCCCCCCCNAAAAAAAAAAAAAAAAAAAAANNNNCNACNCCCCC
CNNNGGGGGGGGGGGGGNNCCNNNNCNNNNNTTTNAAAAAAAAAAAAAAAAAAAANACCCCCN
ANAAAAAAAAAAAAAAANANNNNNNNNNNNNNNNNNANNNNNNNNNAANAAANANAANNNAN
AAAAAAAAAAAANANNAAAAAAANANANAANAAAANAAAANAAANNAAAAAAAAAAANANAA
NAAAAAAAAAAAAAAAAANNAAAAAAAANANAANAANNAAAAAAANAAANAAAAAAAAAANA
AAAAANAAAAAAAAAAAANNNAAAANAANNAAAAAANNAANAAAANANAANAANNANNANAA
ANNAAANNAAAANANAAAAAAAAAAAAAAANNAAAAAAAAAAAAAAAAAN

| | |
|---|---|
| Sequence 79 | cMhvSE006a10a2 |

CCGGGCAGGTACTACCCAAGTGTTACAGGCTCTGCATAGGTCCTCAAACACTTTAAAGGACACGA
ACCATCAAATTCAAAAGAGTAGTGTTTGTTCTATCAGTTCTGAATGTCCACAGGGAGAGGCAACTA
GATTTATGTGGAAAAAGTGCTGTTTGAAGGAGCTGTGTTTTATTTCGAAGTGAAATGACTTTGGGA
ACCAGAACATTTCTGCAGATGTCTGAATATCAAGAACCTATCTCTAAAAGGCATTTATCAGGAAAT
GTTCGCTCACTCCAAGTGCTTTTTAAAAATTCAACATATGGCAATGTTTTAATTTTTGTGCTTTCAA
GAGGTAACTAAATCGATAGGAAGCTGAGGGAAGATCATTCCATTATGGACTTTCTTGTTTGGGTGC
AAGACACTATCCACAGCATTGAAATCTATAATCTCATAAAAGATTCTTATAAACATATACCATATT
TCTC

| | |
|---|---|
| Sequence 80 | cMhvSE045d10a3 |

GATTGGAGCTCCCCGCGGTGGCGGCCGAGGTACTTGCTGGTCTCAAATTTCCACAAGGAGATATCA
ATGGTGATACCACGTTCACGCTCAGCTTTCAGTTTATCCAAGACCCAGGCATACTTGAAGGAGCCC
TTTCCCATCTCAGCAGCCTCCTTCTCAAATTTTTCAATGGTTCTTTTGTCGATGCCACCGCATTTATA
GATCAGATGGCCAGTAGTGGTGGACTTGCCCGAATCTACGTGTCCAATGACGACAATGTTGATATG
AGTCTTTTCCTTTCCCATTTTGGCTTTTAGGGGTAGTTTTCACGACACCTGTGTTCTGGCGGCACCT
GCCCGGGCGGCCGAGGTACTACCTGAAGGAGCTTCAGCTGCCCCTGAAGAAGGAATGAGTAGCGA
CAGTGACATTGAATGTGACACTGAGAATGAGGAGCAGGAAGAGCATACCAGTGTGGGCGGGTTTC
ACGAC

| | |
|---|---|
| Sequence 81 | cMhvSE011g01a3 |

ATTGGAGCTCCCCGCGGTGGCGGCCGAGGTATTANACCGNCGNGAGACAGGTTAATTNTACCCTA
CTGATGATGTGTTGTTGCCATGGTAATCCTGCTCACTACCTCTN

| | |
|---|---|
| Sequence 82 | cMhvSE011g01a3 |

TGCTGTTTCCTGAACTATACCAGTGGNGGAACACTTGAACAAANTGNNTACCT

| | |
|---|---|
| Sequence 83 | cMhvSE045h07a3 |

GCNAATTGGAGCTCCCCGCGGTGGCGGCCGATGTANAACTAGNGNATANNCCGGNCTGTATGAAT
ATTATATNANNCTNATNCATACCATTTANCNCAANGNGGGGCCCNNNNCCANCNTTTTNTTTNNTN
NNCNNAAGGAANANTGAACNCTAAGGAATACATCATGGTAAGATTCTNTCCTACTGTGTCAGCGA
GCGCTGCTGCCGGTCTANATTGCCATGTCCCAACAACAGCAAAGCCACCCTCCCTCCTGCTTCTTC
CAGGATTGCTCTTTAAAGGGACCAGAGTGACATACTGATGCCTACTGAGGCATCTGAGATGCACTG
TGTTGGAGGTTAGCCTCAATGCCAGCCTCTGGTTGTCTAGGTGAGTGACATCACCATAAAATCACA
TTGTGTACCT

| | |
|---|---|
| Sequence 84 | cMhvSE023d03a1 |

CTATAGGGCGAATTGGAGCTCCCCGCGGTGGCGGCCGAGGTACAAGCACGGTTGGCATGGCCTTT
CCAAAGGTCTTCCACTAGAGTCTAGAGAAANCTAAATATAGTCATCCACAAACTGGA

| | |
|---|---|
| Sequence 85 | cMhvSE011b04a3 |

TGGAGCTCCCCGCGGTGGCGGCCGAGGTACTCCATTTATATAAAATTCTAGAGCAGGCAAAACTAT
AGTCACAGAAAGTTGACCACTGATTGTTTGGGGCTGGCAGTTGGGGTATGATTGACCACAAAAGG
GCCTGTAGGAACTTTTAGGGTGACAGAAATGTTCTATATATTGAAGTTGTTTTTAGTTACATGGAT
GTAGCATTTGTCAATAATCGGCTAACTGGACATTTAAAATGGTTCCATTTTCTCACATGTAAATTAT
ACCTCAAAGTTGATCCAAANAAAAAAAAAAAAAAAAAAAAANGTTTNGNCCNNCCCGGGGGGNC
CNTTNAAAAAANGGGGACCCCCCCNNCCNGGGNAATTTNANTNNANCNTTTTNAAACCCCGNNCC
CCCGGGGGGG

| | |
|---|---|
| Sequence 86 | cMhvSE032e09 |

AGGTACCAGTTATCCACTCACTGACTTAGGTGCCTCCACTAGAATTCTCAGCACGTTTTTGCAGAA
CCTGGGCAACAAGAGCGAAACCCCATCTCAAAACCACAACAACAACAACAGGACAACAGAGATT
GGACGACCNGATNGGGNAAAAGCCAANNCANACANGCGTGAANGGCCAGGTACCGGNAAAGTAG
GCACAAGGGNAGCNTCTGCTCAGTGTCGCTACANGGGGGATCTCTCAAGGACTTNACAAACGNGG
NCCACATCCTTCNTAGNGGGAAAGATTACTTGGTTCTCATTNAATGGATCCCTTTGTTTTNGGGNN
CCTACACCTTCNCCCCAATGNTTCNCTTTTCTTNCTTGGTANTCCCNTNNCTNTNCCNAAACTTGGG
CCCAATTTTTAATTTTTAATTTTTTAAACCT

| | |
|---|---|
| Sequence 87 | cMhvSE043f05 |

CGAGGTACAGTCCAGTCCTTGGAGATCGACCTGGACTCCATGAGAAATCTTGAAGGCCAGCTTGG
AGAACAGCCTGAGGGAGGTGGAGGCCCGCTCGCCCTACAGATGGAGCAGCTCAACGGGATCCTGC
TGCACCTTGAAGTTCAAAAGCTGGCACAGACCCGGGCAGAGGGACAAGCCGCCAGGCCCAGGAGT
ATGAGGCCCTGCTGAACATCAAGGTCAAGCTGGAGGCTGAGATCGCCACCTTCCGCCCGCCCTGCT
GGAAAGATGGCGAGGACTTTAATCTTGGTGATGCCCTTGGACAAGCAAGCAACTCCATTGCCAAA
CCATTCCAAAAAGACCACCCACCCCGCCCGGATAGGTGGGATGGGCAAAAGTGGTGTCTTGAAGA
ACCAANTGACCACCCAAAGTTCTTGANGCATTAAACCCAGCANAAGCANGGGTACCTTNGGCCGC
TTCTAAAAACTAGTGGGATCCCCCCGGGCTTGCCANGGAATTTCGATATCAAAGCCTTATCGAATA
CCCGTCCGACCCTCNAAGGGGGGGGGCCCCGGTACCCCAACTTTTTTG

| | |
|---|---|
| Sequence 88 | cMhvSE001a09 |

ACGNACTAATNCTGACTGTNAANGNGACGCNTNACGANCNTTCNCNCCTTNTGGGTCNNAANCAG
GANGAGTTNGATNANNCATNACANAGNTAANNGNTTNGNGGCGNANNAGNATCCNTAACAAAGN
TACTTNTAGNACGTCTGATGGNACCTCTNCCTATCTTTAACAAGCNGATTCCNCCNACNGNTGGAT
TGNTAANNCACTNTTATCGGANACCTGAGCNNTTTTAGGACGGGCCCGAGACAAGCTTTTGTTACC
TTACTGANGANGTGNTGGNGCCCTGGGNATANTGNTNAGTACCTGCCCGGGC

| | |
|---|---|
| Sequence 89 | cMhvSE001d12 |

NCNNGGCNNGTACACGGGAAACNATTNATTCNNGNCTNANGGGGANTTNCCTTANCGGATACTAN
ACCCATACNTTTNANGGCTATGANCACAGACANGTNAGATNCCATGCNNCCTGGGCCANGATCTT
CCNCNANTAGTTNCCTGCTTAAGCAAATAGAATTTCTTANGGGGCAGATNCCAAAANCACCGATN
ATTGGAAAGCAAACACCNACACTGCCANCTTCCCTCCCAGGACTCCTGCCAAGGTTTCCANTACCT
AACGNCGCTCTAAAANTAGTGAATCCCCCNGGCTGCAATGAATTCGATATNAAGCTTATCAATACC
CNTCATACCTANGAT

| | |
|---|---|
| Sequence 90 | cMhvSE001e12 |

AGGTACATGGANNNATTGGCTTNTNACCNGNTGCTCNNCCNGACCATTGNTNGCNGGCNNNTGGN
CATNNACNAAGCCANAANNAAANNTCTGNCACAAAANCGAAATCTNCCNATNTACATTACNAATA
CGNTAAANCNCACCAAGGNGTGAAGGCGATANTGCAGGAACTGCAATGGACCCCTGGNTGGAAC
CCTATCATAGGGACAAGGATGGCTTCCTGGGAACTCCGAGNGGANGGANGACTGCTNNNTNANNC
NAGCACANNCANGATGAAGANNTNTTNATTCTTTAAGANCCTNGNNATTGAACTTNACACTGATC
TGTACCTCNCC

| | |
|---|---|
| Sequence 91 | cMhvSE001h10 |

GATTGGAGCTCCCCGCGGTGGCGGCCCGNCNNGCCANGTACATAAGCNAATATGCCCATTGGGGN
CCTGGGCACTANNNNGTCTNTTTTNGGCANAANNAATGANNCTGTGAACGTGGCCCNTGATGCCT
AATATCCCACAACNACTGTGCCTAT

| | |
|---|---|
| Sequence 92 | cMhvSE007f03 |

ACGTNCCAGGGGCTGTGNATNNACTACCTNNCATAGANCNCCGCCCTCATTCAGCNCAAANTNTA
NGACTTCTTGNTCAANCTGAGNNCNNCATNNATANNNACCNNNCNNTTNNNNGANNNANNNANT
CNCNANNTANTGANAANANTCTTTNTNTNCACCNTNANNNTTANGNTNNTCANNNNCTNTCAAGA
CAANTACGNGNNCAATATNAGGNNTNCTAATNTTNGGGGCNCGATNTTNNTANNTNCNANTCTGG
CTATATAACTNNCCACATGACTGNTANNNNACTTCAATCGTTCAAGAATTATATGANCCTATGACC
NCAATNAATNCCATGTACNTCTNANGCNTNNCAACTACNNGANCGNNNGGCCTGNAANAANTCTA
TATNAACCTTANCTNAANNTTAAACCTCCACNGGGGGCCNTCATCCCAATTTNTGTTCCTNTAATG
AAGGTTAATTGCNCCCTTGGCG

| | |
|---|---|
| Sequence 93 | cMhvSE010c02 |

AGGGCNAATTGGAGCTCCCCGCGGTGGCGGCCGAGGTACAAGCTTTTTTTTTTTTTTTTTTTTTTTTT
TTTTTNAAAAAANCCCCCNTTTTNAATTTTTNNNCCNNTTTTNNNNNNNAAAANNNAAANCCCNTN
NTTTTTTTTNNNNCCCCNGNCCCNNTTTAAAAANCNTTTTTNNGGGNNCCNGGGGGGGGGGNCCCC
CNCNNTTNGNAAAAAANCCCCNNNGGGGGNNNNCCCCCCNTTNNNANNCCNNNNANNNCCNNNA
AAANGNTNAAAAAANNCCCCCNNNTTTTNGGGGGGNCCCCNNGNNTTTTAAAAAAAAAACCCCN
GGGGCCCCCCNAAAGGGGNNTTTAAAAAAANCCCCCNTTTTTTNCCCCCNGGGGGGGGGNNCCCC
CCAAAAAANCCCNTTTTTTTT

| | |
|---|---|
| Sequence 94 | cMhvSE011f07 |

ACAAAGATGNTCCNNNNGTNCCNAATACNCTTNAAAGAANNNGANGGANTTTNCNTGANCTATNT
ATCANNCGCCTGNCANNTAANNAGGCCCNNAAGATGCTATTACCANGCNTAGANCGAACCATNTG
TATNAGAAANCCNNGNCCTATCNCANNGAATNTNGGCCNATNTTCCTGGGCNGTTCNNGNACNAG
AGGANCNCCCNGGANNNGGNAATCNTNNNTNCAGNTTATCNANACCNGCNNCNTCGCNGGNGGG
CCNNNANNCNAGCCTTCGTNCCNTTTAANGANGGNNCNTAGCNCNCTNNTNCNNNTNATGNNCAN
NGCNNNTNCCNGTCNANAANTTNTGGATCNNNCGGGNTGNNNGANTNCGCTCTTGGCCTNATCAN
TNCCATAGACCTTTCT

| | |
|---|---|
| Sequence 95 | cMhvSE015e06 |

AGGTCTAATCTACAAGCGTGGTTATGGCAAAATCAATAAGAAGCGAATTGCTTTGACAGATAACG
CTTTGATTGCTCGATCTCTTGGTAAATACGGCATCATCTGCATGGAGGATTTGATTCATGAGNATCT
ATACTGTTTGGAAAACGCCTTTNAAAAGGAGGGCCAAAATAACCTTTCCTGTTGGGGCCCCCTTTT
CAAAAAATTTGGTTCTTTNNTTCCACCGTAGNGGTNGGNAATTGGAAAAGAAAAAAAANAGNAAC
CCCAACCCCCCATTTTTTNTTGNTTNNGAAAAATNGTTGGGGAAGAAAANTGGCCTTNGGGCCAA
AACCATGNGGGGTAGGGGGGAACCCCAAGNAATTCCNAAAACCCAAGGGGGCCTTTTAANTTTTA
AGNAAAAAGGAAAATTGNGAAAACCTTTAAAANGGGGTTGNTTCCTTTANCCCAATTNGAAATTT
TATTTTTNNTTTTCNTTAAAAGNNCCTNGGGGGTNTTGGGGTTTTAAAANTNAAAAAACCCANGG

| | |
|---|---|
| Sequence 96 | cMhvSE016b08 |

GCTCATCAACACCTCTGACTTTGAGTTTTTTCGTGAAGGTGGGAATGTTTAGCTCGGGAGAGTTGA
TTTATAAGAAAAAGACACGCTTACTGAAGGCCTCCAATGGAAGAGTCAAGTGGGGAGAGACTATG
ATTTTTCCACTTATACAGAGTGAAAAAGAAATTGTTTTTCTCATTAAGCTTTACAGTCGAAGCTCTG
TAAGAAGAAAACACTTTGTGGGCCAGGTTAGTAGGAGTTTTTATCCTTCCTTATATTTTTTCTATGC
ATTTAAACAGTCAGTTAACAAAGGGAATACANGATAATATTAAAGTCAAATAGAAGNACCTCGGC
CGCCTCTAGAACTAGTGGAT

| | |
|---|---|
| Sequence 97 | cMhvSE017e06 |

AGGTACNTATCGATACCCACATNCNNNNTNNNNACNANNNANTANNNTAGAGTATCTATGNNNTT
CCCTGACTNNATGNNNNGTGAANGTGNNNACATCCTNCCGCNNTNATNAANGGATACTNTGACTN
CCTNCTCCTCACTGAGGTGCCTCATNCTACCCGGGNGTNCCTNTGCCANCCTNCCTGGNACATNTG
CTNGNACCTGCCCNATGCCAGGATCATGGNACCAGGCNAGAGGNCACCCGTTNCTTCCTCCCNCA
TGTAGATAAATGGGTCCAGGG

| | |
|---|---|
| Sequence 98 | cMhvSE026f02 |

CTTAGGGCGAATTGGAGCTCCCCGCGGTGGCGGCCGAGGTCCCNTACNGACACTGGCCCNAGTAN
ACGGTGAGTNATGGNGNCANTTGNNTGGGANGAGTTCATAAATATGNTTGGNAGCTAAANCGCAT
GGNNTGATGCTCNTGAANNCTAATNCTNNTGGNTNNNTNCAGTCATGCCTANANANCCTGGTGNA
NTGGTGANATNANTACNCAGGGGTTTGGT

| | |
|---|---|
| Sequence 99 | cMhvSE043b12 |

NAATTGGCAGCTCCACCGCGGTGGCGGCCGAGGTACAGATCANNGTGGNTTNCCTNCNTTGNAAN
AATAATTTNGCTAAACCACNAAGTGTNNCGTGCATTGCTACTACNTTGGNTCTGNNTCCACAAAAN
AGNTTTGAACTCTGCTAACTCANANTCTTAAAAGAAATCTCCTGGTCTAATNGTATNATGAAAAAT
AANAACTATNANCCGACAATTGAGTT

| | |
|---|---|
| Sequence 100 | cMhvSE048g10 |

AGGTACAGAGNTGCCNANNANNNGGGNNCTNTNCTTGNANCACNNGANTNGNTNNCTNTAACAT
GGGGCTACTTACGNCTTCTTACNNGANCACTTGGNNANATTTNCCTTTGNNCTAATACNNNGNNAC
GTCATAGATGGTNTGGGACATANTCTTCCTCCCTTAGAATCGTGGGGGAGCGTGATGATGATCCAC
TANGTGTTAGCAATATGCCT

| | |
|---|---|
| Sequence 101 | cMhvSE052g11 |

ATAGGGCGAATTGGAGCTCCCCGCGGTGGCGGCCGAGGTACNNTTANANCTCCANGAGAAGTGAN
TNATNANANATANNTNCTATTANANNNCTGNNNNNNANCATNCTCNGNNGGTCCCANNCTNNNTG
NCGATNAGANNACTGAGGGNNNNTNAGAAANNNNCTATGCNTTATGCAATTGNTNTGTCNTNANN
NCTNNTCNTATCNACTATAGCNNTTNCTNGNNACATNACANTNCNNGCNNCAATCTNGANNNANT
GGATCNTCNGGCNNGCAGNAANTGCANATGNTNNTTATACNTNCNGCNGANNNAANAGNGGNNN
CNNGCTNNNNCCTATGNNANCNTTATATGNCGGNATNTNGCACACNGGTNCTANTAANNNTNATA
TNNATTTGCNGAANATGTACCT

| | |
|---|---|
| Sequence 102 | cMhvSE003f06 |

AATTGGAGCTCCCCGCGGTGGCGGC

| | |
|---|---|
| Sequence 103 | cMhvSE003g02 |

CNAATTGGAGCTCCCCGCGGTGGCGGCCCG

| | |
|---|---|
| Sequence 104 | cMhvSE011c06 |

GCNAATTGGAGCTCCACCGCGGTG

| | |
|---|---|
| Sequence 105 | cMhvSE011e07 |

CTCCACCGNGGTGGCGGCCGAGGTCNNNCAACATGGTGTTNA

| | |
|---|---|
| Sequence 106 | cMhvSE011f02 |

GAGCTCCCCGCGGTGGCGGC

| | |
|---|---|
| Sequence 107 | cMhvSE030e05 |

CTGATTGGAGCTCCCCGCGGTGGCGGCCGAGG

| | |
|---|---|
| Sequence 108 | cMhvSE030g08 |

NGATTGGAGCTCCCCGCGGTGGCGGCCGAGGTACCCAAAACAAGTGCTTAAAAAAAAAAAA

| | |
|---|---|
| Sequence 109 | cMhvSE035b08 |

TTGGAGCTCCCCGCGGTGGCGGCCGAGGTACNAGACCCAGAGGCGGCTGCTCTCTCCCCCCAGCT
NNGTAAGGNGCCTCCAAAAANAAATTTTTTTTTTTTTTTTTTCTNCTGGGGATGCA

| | |
|---|---|
| Sequence 110 | cMhvSE040g07 |

CTAATTGGAGCTCCACCGCGG

| | |
|---|---|
| Sequence 111 | cMhvSE010d06 |

GCTCCCCGCGGTGGCGGCCGAGGTACCACCATTGTAAGGAAACACTTTCAGAAATTCAGCTGGTTN
CTCCNAAANAAAAAA

| | |
|---|---|
| Sequence 112 | cMhvSE044h08 |

AGGTACCTTTNGACCCCATGGAAAAAAAATATCTAACGTNCAGAACTACCAAT

| | |
|---|---|
| Sequence 113 | cMhvSD003c05a1 |

ATTGGAGCTCCCCGCGGTGGCGGCCGAGGTACGGTGGGGCACCCAGGTAGTAATATGCAGGAAGT
AGAATTGGCAACAAAGGACACAGAATGAAATGGTGAGATGGCTAGCGGAAACATAGGGAGAATG
GCATCACAAAGGCAAAGGGGGGAAAGAATTTCAGTTTAGTGGATAGTCAACCAAGGCATTTCACT
TAGCAGTCAGGAATGAAAAAACGATACTGAATTTGAACATTAGGAAAGCTTGGTAAATTTCAAGA
GTATAATTTCTGCAAAGTTGGAACACAGTGAATAAAAAAGTGCTAAGAAATTGAGGACAATTGAA
AAGTTTAGCAAATGATAAGACAAAGCAGAAGAAGATAGTAGATAGTGAGGACAGCANAATCAAT
AGGAGGGTTTCTTGGGAAGGCCATCTTTGTTTTAAAGTTTATGGGGAGAGAACCAGTGTGCGAATG
GAAGTAGCTAGGGGGAGAAACTGAAAATGCTAGGAAGACTGGGTGTGGTGGCTCATGCTTGTAAG
TCTCAGCTGCTCAGAAGCCTGACGTANGAGAATTGCTTGACCCCANTAGTTTCGTGACCAGCCTGG
AATATANCCAGACCCTGTTTCCATAAAAAAAAAAAGCTAGGAAGGTAA

| | |
|---|---|
| Sequence 114 | cMhvSD003d03a1 |

TACTTTTAAACCAGGTGAGAAAAATTAAATTATGTATTCTAACAAAGTAATATGTGAGATTTTGCA
AATGATTTTATAGAAATACACAAAATAACTCTTTAGCTTGCTCTGAGCATTTTTTTCTTTTCTGATA
GCAACTTTTTAACGTTGTGGATCCACAGAACTTACTGCTTTGCTTTCTCTTTTGGGGTCATAATTCC
TCTCCCCTTGGAGTGTCCACTCCATGCATGTGCACTTAGGATGTGTGGCTGTGTGTGTGTTTGGGAA
CCCTCACGGACACATAAGGTTCTATTGTCATCAAGTAGAAAACCTATCTCATTATCATTATAATGT
CTTCAGATGCTTTCTAAGGTTCACCTCTTTTTTAACATTAGAAGTCAGTGAATGCAGCTTTCATTAT
AATTTTTAATACTTTAAAATGTTTTTGTATTANCTGCCANAATGCTCAGCAGCAAAAGTTATGACTC
ACTTCTAGCAAGTGTGGTAGTTCTTTGCTTNAAGCATTTGGGTTTCATGTAGCTTTTCTTCTTATTTT
TTCTTTGG

| | |
|---|---|
| Sequence 115 | cMhvSD090b03a1 |

GGGCAGGTACTTTTTTTTATTTTTTATTTTTTTTTATTTTTAGTAGAGATGGGGTTTCGCCATGTTGG
CCAGGATGGTCTCGATCTCCTGACCTTGTGATCCACATGCCTCGGCCTCCCAAAGTGCTGAGATTA
CAGGTGTGAGCCACCGCGCCCGGAAGGGGAAGGATCTCTTTATTCAAATACGCACATGCACGTGC
ACAGATACCTTGCATCTGTGAAAGGAAGCTAAGAAATCTGCAGTCGGCAGCTATTTGGAACTATG
GCTTATAAACTTATGTTTTTCAGGAGACAGAGAAACCAAGACTTGGGCCAGTCTTTGCAGTGACC

| | |
|---|---|
| Sequence 116 | cMhvSD090c03a1 |

CCGGGCAGGTACTTAAACACCAGGCGGACATTTCTCCAGGAAGCATTCCATAGCTGTCTCCTCCCC
CACCTTCCAAAGGTCACAGAGAACCCTGGGCCCACCTCTGTGGCTGCAGTCACTGTGCTGATTGTC
ATGTCTGTTTACTTGTATATTTCTTGGCTACCCTGTTAGCTGCACAGGGGAGAGACAGATCTGATTT
GATTTGGTATTGCTAGTGTGAGACATAGACCTTGGTGCTCAATATATGTTTGTGAAAAATCACAGA
AGAGGCCATAAACTGGGGGCAGAAAATCAAAAGCATTAGGTCAAAAGATATCAGAGGATTCACA

| | |
|---|---|
| Sequence 117 | cMhvSD090c05a1 |

AGGTACCAAAATTCTAACTTAGGGCTTTAGAGTTCCTGGATTCCAAGGGAATGCACTCTTACATAT
ACTACATCATGTGCTGCTCACCATCCATGTGGTGATGAGGAGCATTAGATAAGGAGCATTAGGTCC
ATGTAGCAGAACAGTAAACTGAAGCTCCGAACAGCGAAGGAGCTCACCCAAGAGAGCACAGGGC
TAGGATCAGGAA

| | |
|---|---|
| Sequence 118 | cMhvSD095a02a2 |

CCGGGCAGGTACAATTTATTGCAGACCCAGACACGAGAAGGTCAGAGAAAATCAGAGAAAGCAA
GCAAGTGAATTTGCCTTACTCTAGGACCCACACTTTGGTGATCACAGCTGGATGAAGAATGTCAGG
GGATGAATCGGAAGAAATGAAACTGGAAAGAGGAAGGAACCAAGTCTTGAAGGGCCTTGGAAGC
CATGTTAAGAAGGATGAATGAGAGGTAAAGAAGACGACATTGAGCTTTCTCACTTGGGCAGTTGG
CGGATGGCAGTTGGTGGATGGCAGTGGGTGGATGACTTTACTGAGGTAGGAAGCCTGAGNAGGAA
AAGCAGGTTTTGAGGGAGAGTTTGACTAATTGCAGTTTAAGACATGTCATGTCGGAAACATCATGT
ATCACACTGTCCCAGTAAGTAGTTTGAAGACAAAGATCTGGATCTCAAGAGAAGGAGTATGGGGC
TGAAGATNGCAATTATGGGAACTATTGCTACATTGGTTGGGTTATTAAAGACAAAAGAAGTTNGCT
TGAAATTTGCCAAGGGGAGAGTTTNACCAGANNGAGAAAACCAGGCCCCAGGATTAGNAGCTTCC
CAAAGGAACTTTNAAAAAGTTAAA

| | |
|---|---|
| Sequence 119 | cMhvSD095c02a2 |

GGGGCCATTGAGACTGCCATGGAAGACTTGAAAGGTCACGTAGCTGAGACTTCTGGAGAGACCAT
TCAAGGCTTNTGGCTCTTGACAAAGATAGACCACTGGAACAATGAGAAGGAGAGAATTCTACTGG
TCA

| | |
|---|---|
| Sequence 120 | cMhvSD095c04a2 |

AGGTACTGTGCTCAGCCAGGAGAGGCCCAGCATTGCTCAGTGGCTATGCTCCTGACGGATTCTGAT
GATCGATGTANACCTTCGGAGATCACTGATACCTAGCCACTTAATCTCGTTCCTCACAGCCAGAGA
ATATACGTAAGTAAATTGCAGAAGTGTTGGACTCAGGAGAGGCCAGTTAGTTTTGGGGCACCTCTC
TTACAGAGCTCTTTGGGTGGAAAGAAGAAGTGGTGAAATGACCTATGCTTCTGTTTCATCATGACA
GGGAAATCTGGAAGGGGAATTCAGTCTAGTGAATTTACTTAAAATATTAGCTGCANNAAACTAAT
TTACAGGGGAAAGCGGCTTTGTGACATTTTTAAGTGTAGAANGATCCANATGAGAAATGTGAATTT
CNTACCAGAAACTTTGGGGTAGTCCT

| | |
|---|---|
| Sequence 121 | cMhvSD095d04a2 |

AGGTACTTTTTGGTTACTACCTTTACAGACGGCATCAACATGGACCCTCACACCTGCACCTGAGCA
ATGTGGGACATTTGATTCCTCATGGTGACAGTTTCTTTCCCACCCCAAGCTCCAGGGAGACAGTAA
GCTTTCTCATCATTTCTCTGGGCTTGTGGGCAAACATTTTTTAGTCTATGGGAACAGGGAGCACTTC
CAGACTCTATTCTTCATGCAGGAATCTTAATTAAAACCTCTCCACCTCANATATGCCTGCAGCCAC
GTCCGTTGTCCCCAAACAGATATTAAAATCCAGCATTAGGACCACTTAGCCCTATTCCTATTTGAA
AGCCTCTTTGGGCAGCCATGATATCATTATTATTCTCCTTATTCTGGGATTGCTTTTTTACTTCATTT
CTTCTTCTTTTTAAAGTATTANGCTCTATTGAGATATAATTCAGATATCACACCAANTCACCTATTT
AAAAGTATACCAATTCAATGGGTTTCTTAGTATATTCACAGAGCTGGGCAACCATCACCACAAGCC
AATTTTTAAGAACATTTTTTCTTACCCTAAAAAAAAGAAACCCCCNGTACCCTGCCCGGGGCNGGC
CGNTTNTAAAAACTAAGTGGAATCCCCCCGGGGCTTGCAAGGGAATTCCGANNTTNAAGGCCTTN
TTNGAATACCCGGCCNACCCTCNNAGGGGGGGGGG

| | |
|---|---|
| Sequence 122 | cMhvSD095f01a2 |

CCGGGCAGGTACTTTAATACCTGTGATCAAGGTGTCTTTAAATAATTGCTTTCATCTGTGAATGGC
GAAATTACTAGCATAATAAGATTGCTGTAATATTGGTCAGCTTCTGGAGTAGATAGATAAAGAATT
GTGTAATCAGTTTGTGTCCCCAGCTGAGGGGATATTCCTTCTCTTCTCGTTTTATATTAATTGAATT
ATTTTTTAACTCCAAAAAGAAATACATACTTATTGTTACTAATTAAATAGTGCANGGTTATTCAAA
AGAAATCTTAATTTTTCTTTCACTACCTCCCTAAGGAAGGNTAACGTTCACTATTCAGTATCTTTTC
ATACTTTTTTCTTTGGTTCTACAGTAAACATAAAATAGCTATATATAGNGGCCCCTTTTAAATAAAA
ATGTGGATTGTGCAATNACAACAATTATTTTTATTCCTTTTNAAACACNTTGTTTCAAGGGGTTCTT
GGGGCC

| | |
|---|---|
| Sequence 123 | cMhvSD095f11a2 |

CCGGGCAGGTACCTGAGGTGACCCCAAAATTCATCCAAATATTCTATCCAAGAGCAGGCAAATGC
TACATGGGAAATCACAAAGAGGAGGAAAAAAAGAGAGAGAAGAGACAAANTGAAGCTTTGACAA
GCAGCTCAGCTGGGCCAGCCCCTTGGAAGGGAGCCAGCATTGGGAAAGCAGCANCAGCTC

| | |
|---|---|
| Sequence 124 | cMhvSD095g09a2 |

CGAATTGGAGCTCCCCGCGGTGGCGGCCGCCCGGGCAGGTACCATGGCACATATGTGAGGTTTTCT
TCAAAACAGATTGTGTTGCAGGAACTGAAACACCACCAAAAACAATCCCATTAAATGTGGGCAAA
GGGGCCGGGCCTGGTGGCTCACACCTGTAAGCCCAGCACGCCTGGCCCCCATATTCTTAACTACCA
AGCTGTATGCTCTCTGGGATCCTTCACAAAACATGAATGTCACTGCTCTGCTGTATGCCTCCAGTCT
CCCCATCTCTCCTCTCCTCCATCATCATACCTTTTCCAGCCTGTCCCTTGTGCAGTTCTTGGCTCACC
ATCTGAGTATCTATGAGACTGCTTAAAGTCTCTCTGCCTGGAATTAAAACTTGCAAATGAAAGCCTT

| | |
|---|---|
| Sequence 125 | cMhvSD095h03a2 |

GGCGGCCGAGGTACCTTTCTTTCCAGGCCATGGCAAAAAAAATCCAATTATGTCCGTCTTGAGTCT
GTGGNCTTGCTTCTTATGTAGNATTNCCTTTGTGAGCTGAANATTAATGCATGGATTCACCTCCTTC
AGCACATTTCATTTCAATTGTGAAGAAAAGATTCCAGGCACTGAATGTAAAATTGAACATGACATT
TTGACATTCCTTCTTCTGAGAGCTGGGTTGGTCTTAGTTGCTGTGAGGCTCTANACACCGACCATAC
AGGGCGTGGGGCTGCTCCTGGACATGAACATACTTACGAAGTTCTCCCCAATCCACTTTACCCCGN
CCCCGCGTACCTGCCCCGGGCGG

| | |
|---|---|
| Sequence 126 | cMhvSD084g12a1 |

CCGGGCAGGTACGCGGGGGCGCGACTTCCCTGGCCCGCCCCCTGCGGACCAGTGAACCTCGCCCG
AGGGCTCAATAAAGAAGATTTTTGCCCTCTTTTTCTCACCTCTCAGCCTTATTGATCCATGGTGCCC
TTCCATTGCCTTTCATTGGTGCCGAAACCCGGGAGGGGACACCTCCTAAGCCCCCCCAGAGGCTCA
GGGGGACTCCCCTCCTGGTCGGATCAGTCCTCTCCCTCAGTCAGGTCAGGCTTCTCCTCCACGGCC
ATCTGTCCATTTCGTCCGGTTACTTGCTACCAGGTCGCAGTTGCTGCAGCTACTCCAGT

| | |
|---|---|
| Sequence 127 | cMhvSD090c04a1 |

AGGTACTTTCCCAGAGGAACCATTCATCAAGCGGACACTCCTGCGGGGCTGGCCCACTCGACTCAC
GTGACCATCAGCACCTACCAGAACAAGTAAACACTGCCTCCCAGCTGCACATGCTAGGACAGCTC
TGAGTCCTGGCCTGCAGCAGCCACATTCAGGAGGGATATGAGGGAGTTGGCCCCTACCTCCTACGC
AAACCCCAGGGTTTATGTCCTTTACTGACTTCCACATTCCTTTGATGTCCCATGTATGTGACTGGTC
CCTCTGGACTTGCTTCTGGGGACATCATGAACCTGACTCTGTAGGATGTGGGGCATTGCCCAAATA
GAGA

| | |
|---|---|
| Sequence 128 | cMhvSD090g02a1 |

CCGCGGTGGCGGCCGAGGTACAGCCTGTGGAACTCTTGAAACATGGATTTTTTCCTAATAATTGAA
GACGGTTCAAGAAAATATCTTCTACAAGAAAATATGCAACTAGGAGTCCTGCAATGAACCGTTGTT
TGCTTTCTTCAATATCAATTATAATAATATTTTATCTTTAAAATCAGAATTTTACCGAAACAGTTTT
GTCATTTTATTATTTAACTGATGAGAAAAACTATATGTGATTTAGAGTTGCCATGAGTCCTGATTCA
AATCAGATTACTTTTCTTTTGCTAAAAACTTAGCGCAGTAGCCCACCTACAATCCTGCTTGCTTAAG
GGGAAATGGTACCTGCC

| | |
|---|---|
| Sequence 129 | cMhvSD090g04a1 |

CCCCGTAATACCGACCTCACTATAGGGCGAATTGGCAGCTCCACCGCGGTGGCGGCCGAGGTACC
CCAAACAAGTTTTCCTATTTTATTTTTATGCTTACAGATACTCAAATATTAACAATTTAATTAATCA
CCAGCTATTAAAATCATGAAAACATCATGAACACACACTACCGGTGTGGATCTCCACAGTGCTGA
GTTTTTAGATGACATTCCCTACACCCCTTCCTCTATGAAGAGTTTCACAAAAGACGTCTTTAGAAG
GTAAATCTAGCCTATGAAATATTTTAAGCAAAAGACAGAAAGAAGTCTCAAATGTATGTGGTGTA
TGTGGGGTGTGTGTGTGTGAGAGAGAGAGAGAGAAAGAGAGAGGGAAAGAAAGACACAGAGAC
AGAG

| | |
|---|---|
| Sequence 130 | cMhvSD095d06a2 |

AGGTACATTTTGAACTCCCAATTCCCACCCACAGAGCTTGGTGCTAGCTCTGCACACGGTAGATAT
AAGCAAGAACTTAGGCCGAAGTGAATTGAATGACCCATTCTTACCAGATAATTCTGTTCTTGCAGG
GGTATTTCGGATCTGGGTTCTGCCTCAAGGCTGACGGAATCAATACATTCAGCAAGTGTATCCTCA
GTCACGTCTCCATTGAGAGGGGGCTCCAGGGCGTTGGCATCCTGAGGCTGCACAGGGGGCCCAAT
GGCGGCAGCCCCTGCACCCTGCACAGCTGCATTTTCATGCCCCTCCCCTCTGGGGTCAGCTGGTGT
TGGCTCATGTGAAACTGCAGCTGAATCACAATGCACTTCTGGCATCCTCAGGTAAAGAATCACTAT
TAGGCATCTCAGTAACTTCTGCTTTGTCTCCAGTGGCTAAGGTGTCACCCAGCATCATCAGAACAT
TTTTAGTATCGCTCAAGGCGGCCCGCTCTAGNAACTAGTGGGATCCCCCCGGGCTGCAAGGAATTC
CGATATCAAAGCTTATTCGATACCCGTCAACCCTCNAAGGGGGGGGCCCCGGTACCCCAACTTTTT
TGTT

| | |
|---|---|
| Sequence 131 | cMhvSD095f05a2 |

TGCTTCTGCTATGGCGAGGAGTCCTCGGCCTCCAGCCACTGTGCCCACGCCTACCGGTTTTCTGGG
GATGTTGCCACCACCTCTGAAGAGTGAAACCAAGCTTTCCATGCAGGAAGAGCCAGGTGCTGGGG
GCTCCCGCCCGAACTGTGAGGCCCACAGTGCTTAGGGAGAGCACCAGGCTCTACCTTTCTTTCTTG
ACAGTGGGTGAGCAGCGCAGGCAGAGATGTGCAAGGTACCT

| | |
|---|---|
| Sequence 132 | cMhvSD001a06a1 |

GGACCGAGGGTTTGGTGCACCTCGATTTGGAGGAAGTAGGGCAGGGCCCTTATCTGGAAAGAAGT
TTGGAAACCCTGGGGAGAAATTAGTTAAAAAGAAGTGGAATCTTGATGAGCTGCCTAAATTTGAG
AAGAATTTTTATCAAGAGCACCCTGATTTGGCTAGGCGCACAGCACAAGAGGTGGAAACATACAG
AAGAAGCAAGGAAATTACAGTTAGAGGTCACAACTGCCCGAAGCCAGTTCTAAACAATTATTTTT
ACTAAAATGCATAATTATGTGATAGTTATACATATACCAACCTGTTATGTGAGACAAGCTGACCTG
CAAGTAGTCCAAGGCCAGTGAATCA

| | |
|---|---|
| Sequence 133 | cMhvSD001b09a1 |

AGGTACACGTCTCTGTCTGGGCCTCGGCCAGGGTGCCGAGGGCCAGCATGGACACCAGGGCCAGG
GCGCAGATCACCTTGTTCTCCATGGTGGCCATTGCCTCCTCTCTGCTCCAAAGGCGACCCCGAGTC
AGGGATCCCCGCGTACCTGCCCGGGCGGCCGAGGTACCAGCCGCTCATGTTTTTATCGCACCCCTG
GGACCCTGCTGAGTTCTCTGTGCTTCGGAAGGGTTCATCCAGGAGGGTGTAATTCTGACAGGGGTC
AAAACAGACATGAGCCTCTGGGGTGCCAGGAGCTCCGCAGTCCAGGTCCAGCCCATACGAACTGG
CTTCAATGGGGTTTCCATAACCTCG

| | |
|---|---|
| Sequence 134 | cMhvSD002a08a1 |

AGGTACTTGAGCCTAGGCAACAGAGCCAGACTCAGTCCTTTAAAGAAAAAAAAAAATTCTCCCAA
CTTCATAAGTAAACTGCCTAAACAAATCAGGATTCATTTTACCATTCATTTAGCAGAAGAGGAAGG
TAACAGAAGTTCATATATTTCGCCAGATAACTTTATCACCCTCCAACCCAGACTAGAGGTTTTGAT
TTAATTATCTCAAATGAACTTTAATTATTTTGAACTTATGATTACCATAATACCTCTTGTTAGAAAA
GTGAGATTTCTAAAACCTAGTAAGTAATCGTAAAGGTATAATTTTACCACCAGTAATGCAAGTTCT
TAACAGCTGTCTTGGCCTCAGGGGTCATAAACTAATGGCCTCAGTAATAAAATATTTAATAGAAAT
TAATGAGATAGGCCCAATGATGTGGGCCAAGTAAAGAGAGGAGAAATAAGAATTGGTGGGAACT
GTGGCAAATCGGAGAGAGTATGCACATCTAAAGGGACTCAGAGCAGGTTAATTCCAGCCCCTGTA
TACCCCGCGTACCTGCCCN

| | |
|---|---|
| Sequence 135 | cMhvSD002c03a1 |

CCGGGCAGGTACAAGGGGCATTGTCAGTGAGTGGTAATACTTTGAAAGGAATCTTATTTCTTGAGC
AGTAGTTGTCGACAGTGGGCTTAAGATATTCAATAAACCATATTTGTAAACCGGAAAAAAAAAAA
AAAAAAAAAAAAAGTNCCT

| | |
|---|---|
| Sequence 136 | cMhvSD003c02a1 |

GGCAATTGGAGCTCACCGCGGTGGCGGCCGCCCGGGCAGGTACGCGGGGGGTCCCAGCGTCGCTC
CGGACGCTGCCAACCTGTTCTCCACCGTCGCTCGACTTCCACCTCTAAGACTCCCACCTTCAAGATC
CTTCTGTCTAGTGTTTTGGGTTCCCTACACCAGGATTGTGGAGGAAGCGCACGGCCAGAACCCGTT
GGGACCGAGCAGATCAACCATTTATGTTGCACTTAATGATCATCTGCACTTTTTGCATATCCTTAGT
GTTGTCTTTGTGAGGCCACCTCTATAATGGATAATCAAATAGAGGGAAGGGCGGGATTGAATATTG
TGACTTGATTTCAATGTCCCACAACAACTGTGCTAGACAGTTTTTATATGTTAGGTTATTTAACGCT
CCCAAGCACTTATTAAAGTGATGTTACTCTGTTTCATTCTCCAGGAAACTCAGGTTGAATAATTCAT
CAAATTACACAACTGAACTCAAAGACATGGCTGCCCAGTGTGTCACAAAGGTGGTGCTGAATGTTT
CCCGTGCCAATCTTT

| | |
|---|---|
| Sequence 137 | cMhvSD003c02a1 |

GGCAATTGGAGCTCACCGCGGTGGCGGCCGCCCGGGCAGGTACGCGGGGGGTCCCAGCGTCGCTC
CGGACGCTGCCAACCTGTTCTCCACCGTCGCTCGACTTCCACCTCTAAGACTCCCACCTTCAAGATC
CTTCTGTCTAGTGTTTTGGGTTCCCTACACCAGGATTGTGGAGGAAGCGCACGGCCAGAACCCGTT
GGGACCGAGCAGATCAACCATTTATGTTGCACTTAATGATCATCTGCACTTTTTGCATATCCTTAGT
GTTGTCTTTGTGAGGCCACCTCTATAATGGATAATCAAATAGAGGGAAGGGCGGGATTGAATATTG
TGACTTGATTTCAATGTCCCACAACAACTGTGCTAGACAGTTTTTATATGTTAGGTTATTTAACGCT
CCCAAGCACTTATTAAAGTGATGTTACTCTGTTTCATTCTCCAGGAAACTCAGGTTGAATAATTCAT
CAAATTACACAACTGAACTCAAAGACATGGCTGCCCAGTGTGTCACAAAGGTGGTGCTGAATGTTT
CCCGTGCCAATCTTT

| | |
|---|---|
| Sequence 138 | cMhvSD003f08a1 |

CCGCGGTGGCGGCCGAGGTACTGGGAATGGGAAGTTTTCTGAATAAGGGTAACATGGGGCAGAAT
TTGTCTATTGAGGTGCAACATTATGTGCATTTGCTTAAAGTTTTACTTAAACAAACTGGTGCTCAGG
TTAGTTCTCAAACATTAATTAAGATGCTGAAGAAGGTCACTATACATAACCCGTGGTTTCCACAGA
CAGGCAGTCTTGATGTAGAAATTTGGGACAGAGTAGGACCAGGATTAAAACGGGCTCACCAAAAA
GGTCTTAAATTTGATCTTTTTGTTTTTTCTGCTTGGAGTTTAGTCCGTGCTGTCCTCCTGCCATTATC
TTCTTCTTATTCTGCTAGACAGCAGGAATCATATTCCGAGTCTAAAAATCTGAAAAAATATTTTGTC
CCACCCACAGTACCTGCCCG

| | |
|---|---|
| Sequence 139 | cMhvSD004d09a1 |

CCGGGCAGGTACGCGGGGTAACTTTTTAACTTTATAAACTTAGTATTTTAACTTTTTAAACTTTTTT
GTTGAAAACTAAGACACAAAAACACATGTTAGCCTAGATCCACACAGGGTCAGGGTCATCAGTAT
CACTGTCTTCCACCTCCACATTTTGTCTCTGGAAGGTCTTCAGGGGCAATAACACACATGGAGCTG
TCATCGCCTGTGGTAACAACGCAGAGTACCT

| | |
|---|---|
| Sequence 140 | cMhvSD004f03a1 |

CTACTATAGGGGCGAATTGGAGCTCCACCCGCGGTGGCGGCCCGCCACAGTCGCTGCGGAGGGGT
CTGAGGACAGGCGGTCCTGACTCCCGCTGCCCGGTGGAACTAAGACCAGGGACGAGGCCACGCAG
GAGATCAAGGTACCTNTNN

| | |
|---|---|
| Sequence 141 | cMhvSD004h08a1 |

CCGCGGTGGCGGCCGCCCGGGCAGGTACAAGCAGTAATTGATTCACTGGCCTTGGACTACTTGCA
GGTCAGCTTGTCTCACATAACAGGTTGGTATATGTATAACTATCACATAATTATGCATTTTAGTAA
AAATAATTGTTTAGAACTGGCTTCGGGCAGTTGTGACCTCTAACTGTAATTTCCTTGCTTCTTCTGT
ATGTTTCCACCTCTTGTGCTGTGCGCCTAGCCAAATCAGGGTGCTCTTGATAAAAATTCTTCTCAAA
TTTAGGCAGCTCATCAAGATTCCACTTCTTTTTAACTAATTTCTCCCCAGGGTTTCCAAACTTCTTTC
CAGATAAGGGCCCTGCCCTACTTCCTCCAAATCGAGGTGCACCAAACCCTCGGTCC

| | |
|---|---|
| Sequence 142 | cMhvSD005b02a1 |

CGTAATACGACTACTATAGGGGCGAATTGGAGCTCACCGCGGTGGCGGCCCGAGGTACCTGTTGG
CTTCATTTCTCTTATTACCCTGTTGCCAGGCCACCGGGTCCGGCCCAGCCTTGATTCTTCGGGAATC
ACTTCTCCCTCGCCGCGCCTGTTACTGCCTCCACGGATCACTCATCCTCGCTTCGCGTTCTTCCACT
AAAGAACCTGGGGCGCCGCACTACAGCGCCGCGGCCTCCCCGCGTACCTGCCCG

| | |
|---|---|
| Sequence 143 | cMhvSD005c07a1 |

CGAGGTACTAGCAGTAATTGATTCACTGGCCTTGGACTACTTGCAGGTCAGCTTGTCTCACATAAC
AGGTTGGTATATGTATAACTATCACATAATTATGCATTTTAGTAAAAATAATTGTTTAGAACTGGC
TTCGGGCAGTTGTGACCTCTAACTGTAATTTCCTTGCTTCTTCTGTATGTTTCCACCTCTTGTGCTGT
GCGCCTAGCCAAATCAGGGTGCTCTTGATAAAAATTCTTCTCAAATTTAGGCAGCTCATCAAGATT
CCACTTCTTTTTAACTAATTTCTCCCCAGGGTTTCCAAACTTCTTTCCAGATAAGGGCCCTGCCCTA
CTTCCTCCAAATCGAGGTGCACCAAACCCTCGGTCC

| | |
|---|---|
| Sequence 144 | cMhvSD005h11a1 |

AGGTACTTGNNCCAAATGTGCAACATNAATNCGGAACCNANGANCANAAGACTNNTTACCNATAC
TGGAACNNGGNCAANTNNNANCCCACGNGAATNTTCTNNGTCANATNNCCACATCCNCNCNGTGC
TGCNGAGGNTGTGCNGACTGNACTNCTTGTNCNANANNNGNCNTTNNNNCTCTNCCNNACNGNNN
ATNCCNNTGCCC

| | |
|---|---|
| Sequence 145 | cMhvSD005h11a1 |

NGAACATCAACTTTTGANCTTTTAGTGANGGTATATANCGCNCTCGGNCTTNNNATNGANATNCCT
TGTNANTGTGNNAAATCTGTATCNCGCTTACAATAACTACCNACGTANGCAGCCGNGAGCATANG
AGC

| | |
|---|---|
| Sequence 146 | cMhvSD005h12a1 |

NCGCCCGGGCAGGTACAGGTATTTGTTGCATTATTCTAACAACTTTACTGCAGATTTCACTTTTTCA
AAACTAAAAGTTGAGGGAAGGGGAAACACCAAAAAACCCTCCCACGGCCACTCGCCCTGCTTGGG
CTGCTGCTTTTTGAGATCTCANAAAGTTGGACAAGGGCCATGACCAGCAGCCTGNTCCAAAACAA
CAACTAGGAACCTGCTGTGGGTCACAAGCTTGGGAAGCTGCTGGGGGCAGATTTCACTTTGTGCTT
CTGGGTGAGGGCAGGGGCGTGAGGGTGATAAAATACTTTTGTGAGCTGAACAGNGGGGAAACAA
AAGTTTCAAAA

| | |
|---|---|
| Sequence 147 | cMhvSD006e04a1 |

CCGCGGTGGCGGCCGAGGTACCTTCTCACACCTGCGTTCTTTTCTTGAGAGATACTGTGATAAAAT
AAACAGTGAGATTCCCCCACTCCCTTTCCCTTCATCAAGAGAACACCACAGTTTTCTCAAGCTGTG
CCTGAAGCTCTTTCAAATCACCTTGCTCTTGCACTTGCGGGAGGGGTAGCTACCAGCATTCTCGGG
AGGCAGGCAGGTCCACTTCGAAATTTGCTCTTCAGACTGATGGACTCAACTGTCCCAGATGAAATC
CAAGAGTAATGAAGATATTCTAAATTGGATAGTGGTGATGGTTGCACAACTCTGAATAGACTAAA
AACCATTGAATTTTATACTTTCAAGAGGTGAATTCTGTGGCATGTGGATTATATGTCAATTTGAAA
AAAAAAAATAAACTGACTTTTCAAGTAGAGGGACATATCCCCTCAAATGGGGTTGGAGGAATATC
CTGGTGGTGAGTAGGAACTGTGATGATTTAATATTTATCAGAAACGGGGTAGTGTAAGATTTTGAA
AAGGGTNAAAAGTACCTGCCCGGCCGGCCGCTCTAGAACTA

| | |
|---|---|
| Sequence 148 | cMhvSD007g03a1 |

CACTACTTAGGGCGAATTGGAGCTCCCCGCGGTGGCGGCCGAGGTACACTCTTCCTTAAGTCCAGT
GGTGCAGGAAAGCTTCAGTTTGTCAATATCACGCAAGACAGGGACACCAAACACTACCCCTGCCC
AAAGGAGCCCCTCACGGACGCCGCCATGTTGTTACCGGACCCCCCCGCGTACCTGCCCG

| | |
|---|---|
| Sequence 149 | cMhvSD007g04a1 |

ACTTAGGGCGAATTGGAGCTCACCGCGGTGGCGGCCGAGGTACGCGGGGGAGGAACTGCTCAGTT
AGGACCCAGACGGAACCATGGAAGCCCCAGCGCAGCTTCTCTTCCTCCTGCTACTCTGGCTCCCAG
ACACCACTGGAGAAATGGTGATGACG

| | |
|---|---|
| Sequence 150 | cMhvSD007g04a1 |

GTCACGATATTACTACCCACTTAGCCTGGTACCTGCCCGGGCGGCCGCTCTAGAACTAGT

| | |
|---|---|
| Sequence 151 | cMhvSD007g04a1 |

TAGTGAGGGTTAATTTGCGCGCTTGGCCGTAATCATGGTCATAAG

| | |
|---|---|
| Sequence 152 | cMhvSD008d08a1 |

ACTTAGGGCGAATTGGAGCTCCCCGCGGTGGCGGCCGCCCGGGCAGGTACGCGGGATTCCTGGCT
TTTTAACTTTNNCAAATGTAACCTCCCATGTGCTNNGAGAAAGGAAAATTTAAGACAGCTTATGAA
AGGGAGGAGAANCAACANATGGNNCAGGTCACCCAAATGCCAACCATGAAAGNGCTCATTTTCTA
GGCTAAAAATTGAACCTGAACTCAGGCCACCATNGTGAAAAGACAAAGCCTTAACTGCTAAGCTA
CACGCATTGGGCAGTTTCCACTGCTTTTCCCAGAAGGAGCCCANAGCAGGGAATTTTGAGCTTGCA
AAGGCTTTTAACTGCTCAAGATAATTNGNANAGCTAACTACTACCCCAAAATCCC

| | |
|---|---|
| Sequence 153 | cMhvSD008e08a1 |

CTACTTAGGGCGAATTGGAGCTCCCCGCGGTGGCGGCCGAGGTACGCGGGAAGATCTACACTATT
ATGTCACCCCAGAAAGTGAACTCTCAGTCTTCCCAGCCAGTCTCTTTCTTATCATAGGTTAGCTTGC
TTATTCTGGAATTTCGCGTATACAGATGCATGCCATGCCATAGGTACCTGCCCG

| | |
|---|---|
| Sequence 154 | cMhvSD008f08a1 |

GGGCTATTGGTTGAATGAGTANGGCTGATGGTTTCGATAATAACTAGTATGGGGATAAGGGGTGT
AGGTGTGCCTTNTGCTAAGAACTGNGCTAGGNCNTTTNCAANNTTACNNCNAAAGCCTATAATCA
CTGCGCCCCCCGCGTACCTCN

| | |
|---|---|
| Sequence 155 | cMhvSD008f08a1 |

CGGGCTGCAAGGAATTCGAATNTCAAGCTTTATCGATACCCGTCCNACCTTNTATNGTNGTGGGCC
CGGGAAACCCCAAATTTTTNGCTTCCCCTTTTANATGAAGGGGTTAAATATGCCGCCGCCTTGGGC
CGTTA

| | |
|---|---|
| Sequence 156 | cMhvSD008g09a1 |

CCGCGGTGGCGGCCGAGGTACAAGCAGTAATTGATTCACTGGCCTTGGACTACTTGCAGGTCANCT
TGTCTCACATAACAGGTTGGTATATGTATAACTATCACATAATTATGCATTTTAGTAAAAATAATT
GTTTAGAACTGGCTTCGGGCAGTTGTGACCTCTAACTGTAATTTCCTTGCTTCTTCTGTATGTTTCC
ACCTCTTGTGCTGTGCGCCTANNCAAATCAGNGGTGCTCTTGATAAAAATTCTTCTCAAATTTAGG
CAGCTCATCAAGATTCCACTTCTTTTTAACTAATTTCTCCCCAGGGTTTCCAAACTTCTTTCCAGAT
AAGGGCCCTGCCCTACTTCCTCCAAATCGAGGNGCACCAAANCCTCGGTCCCN

| | |
|---|---|
| Sequence 157 | cMhvSD009c12a1 |

TGGAACNCCACCGCGGTGGCGGCCGCCCGGGCAGGTACCTTTTTGCCCTGCAGGGACTGNACCTG
CTGTGGGATTTGAATACAAATGGTGGAACACGCTGCCCACAAACATGGAAACGACCGTTCTCAGT
GGGATCAACTTCGAGTACCT

| | |
|---|---|
| Sequence 158 | cMhvSD009f06a1 |

CCGGGCAGGTACCCAGGGAACAAATGCTACTGGGACTCCACACCTACCTAAGAAGCAGCTCTACC
CAGACTCCACATGGCTCTCTGTTTTGGTCTGGAGACCCCAGCTGGGGTATCTCCTGAGCCCAGGGA
TTCAAAGGTTCGTGGCAGAAATATGCATCCCACGGGACTCTCACTCACTCACCATTTTCTTGTAGG
GGGATTCCCCTGGGTCTGTGCCACTCCTGGGTGAATGGCTGATCTGTCTCACTCTTCTCCGTGATCC
GAAGGTCACACTATGTCACTGATGAATCCTTATGTGTCCACCTGGATGTTCCGGTTGAAGAGCTAG
TGTCTCACCACTCTT

| | |
|---|---|
| Sequence 159 | cMhvSD009g03a1 |

CGCCCGGGCAGGTACTCTCCCTCTTTTCCTAGGGATGTGGCTTCCTGAGAGCCAAGTTGTAGTGAC
TGTCATCTCTCTTGTGGATCTAGCCACCCAGCAGGTCTACCAGGCTCTGGGCTGGTGCTGGGGGTT
GTCTACACTGGGTCCTGTGATGTGAACCATCTGCAGATTTCTCAGCTATGGGTACCT

| | |
|---|---|
| Sequence 160 | cMhvSD010b09a1 |

CCGGGCAGGTACCTGCCACATGTCGGGCCGGTCAGCACAGGTTTTCTGCAGGGCTTCTGGCTGGGC
TGGCAAAAAGCAGCAGGGAGCAGGACAAAGCTTTTTTTCTGGCCTGACTCCCCCTTGCTGAGCCCA
GCGCTGCCACCTGGGTGGATGGTCCCCGGGGCCCTATTCCCAGTTGCTCCAGAGCCACTATTTAGG
ATCCAGGTTGTGCCACCAAGTTCAAGGCTGGTTGTGATGGTGAGAACAGCTGCTTTCATAGAAAAA
TCATCATGTCCTAGCACAGATGGCCCCAAGCAGGGGAAGTACCT

| | |
|---|---|
| Sequence 161 | cMhvSD010c04a1 |

CCGGGCAGGTACCAAGCAGAAACCTGGCCAGGCTCCCAGGCTCCTCATCTATGGTGCATCCACCA
GGGCCACTGGTA

| | |
|---|---|
| Sequence 162 | cMhvSD010c04a1 |

CGCAGTATAATAACTGGCCTCCGACCACCTTCGGCCAAGGGACACGACTGGAGATTAAACGAACT
GTGGCTGCACCATCTGTCTTCATCTTCCCGCCATCTGATGAGCAAGTTGAAATCTGGAACTGCTCTG
TTGGGTGCCTGCTGAATAACTTCTATCCCAGAAAAGGCCAAAGTACCTNGGGCCGCTCTAGAACTA
GTG

| | |
|---|---|
| Sequence 163 | cMhvSD010c09a1 |

AGGTACAAGTCATAATCTCTTTTCAAGCCGGCCTAGCCCCTTCCCGGAACCTCGGCTCCCCCCCAA
CGAAACTACTGCTAAGCCAACTGGACTACACTTCCCAGACTGCTTGGAGCCTCTCTCTCCGCAGAA
CCTCGTCTTCCGCGAGCTTTTCCTGGAGGTTCTAGGAGGGATGCCCCTCAATGCCACGACGCCATT
TCCTACTACCCCCGCGTACCTGCCCGGCGGCCGCCCGGGCAGGTACAGCAAAACCCACCTGTGTAA
ACACACACAGCAAAGTGATGTAAGAAGTTTCCATATAAAGGGCTGCAGTATGGAGAGGTAATGTG
CAGGCTGGTTTGCGGCTGTAGGGGCCACCTTGCTGCAGCTCTCCACTGATATGGTACCTCGGC

| | |
|---|---|
| Sequence 164 | cMhvSD010d08a1 |

CCGCGGTGGCGGCCGCCCGGGCAGGTACCGCAGCAGAGCACTCTCAGCTCTGGGTCTTGCAGGCG
CAGGGCTCCCCCATGCCAGCAGAAAGATTTCCTCTGGACAGGCGACACTAACAGGTGAAGATCTC
GGGAGACCATGACTAAGAAAAGAATTGCTGTGATTGGGGGAGGAGTGAGCGGGCTCTCTTCCATC
AAGTGCTGCGTAGAAGAAGGCTTGGAACCTGTCTGCTTTGAAAGGACTGATGACATCGGAGGGCT
CTGGAGGTTCCAGGAAAATCCTGAA

| | |
|---|---|
| Sequence 165 | cMhvSD010f12a1 |

CCGCGGTGGCGGCCCGAGGTACAAGCAGTAATTGATTCACTGGCCTTGGACTACTTGCAGGTCAGC
TTGTCTCACATAACAGGTTGGTATATGTATAACTATCACATAATTATGCATTTTAGTAAAAATAATT
GTTTAGAACTGGCTTCGGGCAGTTGTGACCTCTAACTGTAATTTCCTTGCTTCTTCTGTATGTTTCC
ACCTCTTGTGCTGTGCGCCTAGTCAAATCAGGGTGCTCTTGATAAAAATTCTTCTCAAATTTAGGCA
GCTCATCAAGATTCCACTTCTTTTTAACTAATTTCTCCCCAGGGTTTCCAAACTTCTTTCCAGATAA
GGGCCCTGCCCTACTTCCTCCAAATCGAGGTGCACCAAACCCTCGGTCC

| | |
|---|---|
| Sequence 166 | cMhvSD010g02a1 |

TCCTATAGGGCGAATTGGAGCTCCCCGCGGTGGCGGCCCGAGGTACTCAAAGGTGATATTTGCTTT
TTTCAATGCTTCAGGGGAAAAATCCTTTTCTTTACAAACTTCCATCAGTTTAGGAGTCAGTCTGTAT
GCCTTTAGTGAGAGAGATCCTTGGGCAGTTTTTATGGGATCATAAATGAGAACGACAGATTCTTCA
ATGGCATGCTGGTAACTAAACTGAGAGTCCGGGAGTGCCCGGGTAACGAATGAGCCATAGTATGT
GGACTGATACCAGCCCACGTGAAGATGATCAATGTTTACATGGCGAAGCTCCGCATCATTTCCATC
TTGATATTGGACAGAACCTCTAGCTGAGCTTGTCCTCTTCACACTGAGTAATGGGTTATGTTTCTTC
CCTGAGGGCCTAAACTTTTNATTTGNTCTTATTAAATATTATTCTCTTTTAAAAGCTTCTAAATTTC
AACTGGCCCTGATTAC

| | |
|---|---|
| Sequence 167 | cMhvSD010h04a1 |

CGGCCGAGGTACAGTGCAGAGGACTGGAATGGATATAATGTCTGCAAAACAAAAACATGTCTAGT
GAGCCATCTACTAATCTCAACCACTGGTCTAACTCATGACAGTCTCAAAATGAATATTTAAGAAAA
AAGTAGTGGCATCTAAAAATATAGACGTTTTGCAACTGACTCAGGGAGAGCTCTTTCTTCAACTAC
TGAATATACTGGTTTTAAATGATGGAGTGAGACAAAGAGGCTCTTGCTGACGTGCTCTACTTTGAT
TTCTATCCTAAAATCTAACAGGTAATCAATGTGTTTGGCTACCTATAGGAGCATCCACCAACTGAT
ATCATTTTTTTTTTTTTTTTTGAGATAGAGTCTCATTCTGTCACCTAGGCTGGAGGGCAG

| | |
|---|---|
| Sequence 168 | cMhvSD011c10a1 |

CCGCGGTGGGCGGCCCGCCCGGGCAGGTACAAGCAGTAATTGATTCACTGGCCTTGGACTACTTGC
AGGTCAGCTTGTCTCACATAACAGGTTGGTATATGTATAACTATCACATAATTATGCATTTTAGTA
AAAATAATTGTTTAGAACTGGCTTCGGACAGTTGTGACCTCTAACTGTAATTTCCTTGCTTCTTCTG
TATGTTTCCACCTCTTGTGCTGTGCGCCTAGCCAAATCAGGGTGCTCTTGATAAAAATTCTTCTCAA
ATTTAGGCAGCTCATCAAGATTCCACTTCTTTTTAACTAATTTCTCCCCAGGGTTTNCAAAACTTCT
TTNCAGATAAGGGGCCCTGCCCTACTTCCTTCAAATCGAGGTGCACCAAACCCTCNGTCCCGGC

| | |
|---|---|
| Sequence 169 | cMhvSD011e09a1 |

CCGCGGTGGCGGCCCGAGGTACGCGGGTCCCCATGTGTGACGCCGGTGAGCAGTGTGCAGTGAGG
AAAGGGGCAAGGATCGGGAAGCTGTGTGACTGTCCCCGAGGAACCTCCTGCAATTCCTTCCTCCTG
AAGTGCTTATGAAGGGGCGTCCATTCTCCTCCATACATCCCCATCCCTCTACTTTCCCCAGAGGACC
ACACCTTCCTCCCTGGAGTTTGGCTTAAGCAACAGATAAAGTTTTTATTTTCCTCTGAAGGGAAAG
GGCTCTTTTCCTTGCTGTTTCAAAAATAAAAGAACACATTAGATGTTACTGTGTGAAGAATAATGC
CTTGTATGGTGTTGATACGTGTGTGAAGTATTCTTATTTATTTGTCTGACAAACTCTTGTGTACCTG
CCCCGGGCCGGCCCGTTCTAGAAACTAGTGGGATCCCCCCGGGCCTGCNANGAAATTCGATATCA
AGCTTATCCGATACCGTCGAACCTCGAGGGGGG

| | |
|---|---|
| Sequence 170 | cMhvSD011f10a1 |

CGCCCGGGCAGGGTACTTGGATTACAGGCGTGGACCAGCATGCCATGCCTATAGTGATATCTTTAA
GTAACCCTCTCTTTTCTTCTTTTGAGCAATTTTTCAAAGCAACAGGCATTTTATTAAATAAGAAAGT
CGATGTGCTTTCCTAATGCCTGTTAATAAAGTAAGGAGCCAAGGAACCTCTGTGATTTCAATGAAA
TCCCTCCAGATATTATAGGCTACTTGTTACTGACAAGTATGGCAGGAACTGCAGGTCAAGCTGTGA
TAGGCAAATAGATCTTGCTGAAGAGGAAGAATGATTGGCTAAGATAATGCCCCAAGACAGCTGGC
ATACCTTTAGACACAGCTAAATTGAATGCTTTCTGANGAGGAGTGTATTAAGTCTGTCTCACACTG
ATATAAAGACATACCTGAGAATGGGTNATTGAAAAAA

| | |
|---|---|
| Sequence 171 | cMhvSD012a08a1 |

GGTCTCGGTCACTCGAATAACCCGACATGGCGTCAATGGTTGCGGTTGGCGGGGAACGAAGTATA
TAGAAAAGCGTGCGACAAGTCGCTGGAAATGGCCTCGATGACGGCGAAGCCTTGCGGGGGCNGGC
AGCGGAGGAAGGACACCGATGACACCAGCCGAAGCTGCACTACTAGAGACCGGTAGAAATGAAT
GAGGTCCCCGCGTACCTCGGCCGCCCGGGCAGGTACAATGCAAAGTATAGGCTTTTGAACTAAATT
GGCCTGGGTTCAAATATGAGCCCTCTCACATTCTATTAGGTTGAACCATATAAAAATGGAGATATT
CAATCATTTTTTTACAGTTTCACGTAGTTCA

| | |
|---|---|
| Sequence 172 | cMhvSD012c04a1 |

CCGGGCAGGTACCTTTGGTTAAGAGTAGACAAGGCAGACATCTGAGCCTGCATGACTCAGCAAGT
TTAGGGTGCAGGCACATACTCCACTTGTTGTATAACCTGTTTGTGTAAGCTGATACTTGCCTTGGAG
CCACTATTGTCTGTAAAAGGTATAACTGCCCTGCTGACACTGTGCATGGGGGACATGGCTTGGCTT
GGCTCTTGGGCATGGCTTGACATGGCTCTTGCGCTCATGCCCAGAGAGAGAAGGAGATAAACTGC
TGACCCTGA

| | |
|---|---|
| Sequence 173 | cMhvSD012e09a1 |

CCGGGCAGGTACTTGGATNACAGGCGTGGACCAGCATGCCATGCCTATANTGATATNTTTAAGTA
ACCCTCTCTTTTCTTCTTTNGANCAATTTTTCAAAGCAACAGGCATTTTATTAAATAAGAAAGTCNA
TGTGCTTTCCTAATGCCTGTTAATAAAGTAAGGAGCCAAGGAACCTNTGTGATTTCAATGAAATCC
CTCCAGATATTATAGGCTACTTGTTACTNGACAAGTATGGCANGAACTGCANGTCAAGCTGTGATA
GGCAAATAGATCTTGCTGAAGAGGAAGAAT

| | |
|---|---|
| Sequence 174 | cMhvSD013d01a1 |

CCGCGGTGGCGGCCGCCCGGGCAGGTACAAGCAGTAATTGATTCACTGGCCTTGGACTACTTGCA
GGTCAGCTTGTCTCACATAACAGGTTGGTATATGTATAACTATCACATAATTATGCATTTTAGTAA
AAATAATTGTTTAGAACTGGCTTCGGGCAGTTGTGACCTCTAACTGTAATTTCCTTGCTTCTTCTGT
ATGTTTCCACCTCTTGTGCTGTGCGCCTAGCCAAATCAGGGTGCTCTTGATAAAAATTCTTCTCAAA
TTTAGGCAGCTCATCAAGATTCCACTTCTTTTTAACTAATTTCTCCCCAGGGTTTCCAAACTTCTTTC
CAGATAAGGGCCCTGCCCTACTTCCTCCAAATCGAGGTGCACCAAACCCTCGGTCC

| | |
|---|---|
| Sequence 175 | cMhvSD014d03a1 |

CGCCCGGCAGGTACGCGGGGAGAGGGAGCTGGGCAGGGCACAGCAGGGCAGGAGTGTGTTTGAT
GTGTCCTGGGAACCGCCCTGAGGCCGTCGTGTGGCTGGAGTGCTGCAGGTGTCAAGGAAATTGTA
GGAGATGTCTCCTGAGTGTGATGGAATATAACCAGATTTCCAGAAGGAACTGACATGATCTGACTT
AAAAAGGCCACCTACATTTACATGAAGGCCGCCTACCTCAGCATGTTTGGGAAGGAGGACCACAA
GCCGTTCGGGGACGACGAAGTGGAATTATTTCGAGCTGTGCCAGGCCTGAAGCTCAAGATTGCTG
GGAAATCTCTACCCACAGAGAAGTTTGCCATCCGGAAGTCCCGGCGCTACTTCTCCTCCAACCCTA
TCTCGCTGCCAGTGCCTGCTCTGGAAATGATGTACCT

| | |
|---|---|
| Sequence 176 | cMhvSD014f04a1 |

GGGGCCATTGAGACTGCCATGGAAGACTTGAAAGGTCACGTAGCTGAGACTTCTGGAGAGACCAT
TCAAGGCTTCTGGCTCTTGACAAAGATAGACCACTGGAACAATGAGAAGGAGAGAATTCTACTGG
TCACAGACAAGACTCTCTTGATCTGCAAATACGACTTCATCATGCTGAGTTGTGTGCAGCTGCAGC
GGATTCCTCTGAGCGCTGTCTATCGCATCTGCCTGGGCAAGTTCACCTTCCCTGGGATGTCCCTGGA
CAAGAGACAAGGAGAAGGCCTTAGGATCTACTGGGGGAGTCCGGAGGAGCAGTCTCTTCTGTCCC
GCTGGAACCCATGGTCCACTGAAGTTCCTTATGCTACTTTCACTGAGCATCCTATGAAATACACCA
GTGAGAAATTCCTTGAAATTTGCAAGTT

| | |
|---|---|
| Sequence 177 | cMhvSD015c06a1 |

GCGGCCCGAGGTACTGTCCAACTGGATGCTGCCCTGGTGGCTGAAGGCACACTTCATGATGCTGTC
CAGGGTCATCAGGGAGACATGTTGAAAGAGCTCCAGACGTGAGTTTTGGGCAATGTGTTCCTCCCA
TTTGTTCAGCATCATCCGAACACTCTCAGACATCATGGTGATGAATATTTTCAGAATGCTGATGTTG
AAGCCAGGTTTCACAATCTGGCGGTGCTTTTTCCATTTAGAACCATCCAGGGTCACAAGTCCTCGA
CCAACCCAGGATTCAAGGATTTTGTGGCTAACAGCACTTTTGGGATCTTGTCTTTTCGGGAGAATC
TTGGCATAGTCTGGGTCATGGACACTGAAGAACATCGTAAAGGGTCCAACCCACAAGGGAACAGC
ACATGGGTATTTTTCCATCAGCTTATGATACACCTCAAACTCCTTTACTGGGTAAAACTCCTTGTGG
CCATAAACCAAGTGGGCAGGGGGTGCANGAAAACAGGTGCAGGGCTCTGAACATCCATCTCCTCC
TNTGGTACCTGC

| | |
|---|---|
| Sequence 178 | cMhvSD016d08a1 |

AATNGGAGCTCCCCCGCGGTGGCGGCCCGGCCATGGAGGCTGATGGGGCCGGCNAGCACATGAGA
CCNCTACTCACCCGGGGTCCTGATGAAGAAGCTGTTGTGGATCTTGGCAAAACTAGCTACNNTGTG
NAACCNAAGTTNANACANANGAACTTGAAGAGTCATANAGCTGTNTATNNTGGAGTTCACGTCCC
GTTTAGTAAAGAGAGTCGTCGGCGTCATAGGCATCNGTGACACAAACATCACCACCAAAACGNAN
GNNANATANTTNAAANAAAAGTCCTCNGCCGCTCTAGAACTAN

| | |
|---|---|
| Sequence 179 | cMhvSD016f01a1 |

GGAGCTCCCCGCGGTGGCGGCCGACGTNCAAGNATCTGTTGCNTGCACATCTNCGATAGCCAACG
CCTGNCCATNATTGGNCNNATANAAACCCTCNTGCTNCATGATACCTACAGGANAAACACAANCT
CGGTNNGCTNTTCGAGTNCTGAAAGGTGTGAATAAGTTACCACCACCAAGTGTCATGATAGAGGA
AATTAATGCAAGGAAAGAAAACAAGCCCAGTTGTTCCGCTTGACTGGCCCAGGAAAATGGGAAGG
AGCCAGAAATGCCATCATGACCCAGTGGGACCGAACATTCAAGGTCATCAAAGCTCGAGTTGTAC
CTGCCCG

| | |
|---|---|
| Sequence 180 | cMhvSD016f07a1 |

CCGCGGTGGCGGCCCGAGGTACCCAGGGAACAAATGCTACTGGGACTCCACACCTACCTAAGAAG
CAGCTCTACCCAGACTCCACATGGCTCTCTGTTTTGGTCTGGAGACCCCAGCTGGGGTATCTCCTG
AGCCCAGGGATTCAAAGGTTCGTGGCAGAAATATGCATCCCACGGGACTCTCACTCACTCACCATT
TTCTTGTAGGGGGATTCCCCTGGGTCTGTGCCACTCCTGGGTGAATGGTTGATCTGTCTCACTCTTC
TCCGTGATCCGAAGGTCACACTATGTCACTGATGAATCCTTATGTGTCCACCTGGATGTTCCGGTTG
AAGAGCTAGTGTCTCACCACTCTTTCTGCTATTTGTGAGAAGTGGCACACACTAGCTGCTTCTAGTC
AACCATCTTGGCCCCACCTCACTCACTTTTCTCAAGTAATCAAAGACCAGAAAGGATGTCCTTTAC
AAGAAGCAGATCCCCCAAAATGTAAGAANTCACTTGAAAANGNGGGGAGCTCAAACCCAAGANA
AGGACTTATCTNGCAGCATAAAAAACAACTTGTACCTGCCCGGGCCGGGCCGNTTTAGAACTANA
GGGATCCCCCGGGCTGANGGAATTNATTTNANCTTATTGATNCCNNNGACCTNAGGGGGGGGCCC
GGTN

| | |
|---|---|
| Sequence 181 | cMhvSD018b02a1 |

AGGTACTTTTTTTTTTTTTTTTTTTTTTCCTTTTTTTTTTTTTTTTTTTTTTTTTTTTTTTTTTTTTTTTTT
TTTTTGGGNCCCNCCANNCTTTGATTGGCCCNCAACANTNTTACAAACAAAAGGCATTAGGCAAA
GCATGCNNAATTGATNGGAGNCCCTTGGNCAAAGGTNTTATTGATTGACGGCAATCAAANCCNCN
CCCTNAAAAAGGATTTGANNAGGCCNNTTNTGNCCATNTGCAAAAGGNTCCCCAAAAGGGGCAAA
NGGCGGGGCCCNGGNGGNAGGGNNCCATGGGANTTAGGGNGACCCNNAACCANNANTACCAANA
GGCCTNTNAGGANTGCAANGAAAAANAGGACCCTNANCNCCATGGTTCCAGNNTNACTGCCCTGC
CCCCGNGTACCTGCCCG

| | |
|---|---|
| Sequence 182 | cMhvSD018b02a1 |

CCCCCTGGNGAAANANGGGCANAACNGNTNCCNGGGGAAAANNNTNTCCNNTAAAATNCNCAAA
ATANAAACCNGGAACAAAANNGAAAACCC

| | |
|---|---|
| Sequence 183 | cMhvSD018h06a1 |

AGGTACAAACTTAGAAGAAAATTGGAAGATAGAAACAAGATAGAAAATGAAAATATTGTCAAGA
GTTTCAGATAGAAAATGAAAAACAAGCTAAGACAAGTATTGGAGAAGTATAGAAGATAGAAAAA
TATAAAGCCAAAAATTGGATAAAATAGCACTGAAAAAATGAGGAAATTATTGGTTACCAATAGAA
GGGCAATGCTTTTAGATTAAAATGAAGGTGACTTAAACAGCTTAAAGTTTAGTTTAAAAGTTGTAG
GTGATTAAAATAATTTGAAGGCGATCTTTTAAAAAGAGATTAAACCGAAGGTGATTAAAAGACCT
TGAAATCCATGACGCAGGGAGAATTGCGTCATTTAAAGCCTAGTTAACGCATTTACTAAACGCAG
ACGAAAATGGAAAGATTAATTGGGAGTGGTAGGATGAAACAATTTGGAGAAGATAGAAGTTTGA
AGTGGAAAACTGGAAGACAGAAGTACCTCGGC

| | |
|---|---|
| Sequence 184 | cMhvSD019b10a1 |

AGGTACAAGTTGTCTTTATGCTGCGAGATAAGTCCTCTCTTGGTTTGAGCTCCCACCTTTTCAGTGA
ACTCTTACATTTTGGGGGATCTGCTCTTGTAAAGGACATCCTTTCTGGTCTTTGATTACTTGAGAAA
AGTGAGTGAGGTGGGGCCAAGATGGTTGACTAGAAGCAGCTAGTGTGTGCCACTCTCACAAATAG
CAGAAAGAGTGGTGAGACACTAGCTCTTCAACCGGAACATCCAGGTGGACACATAAGGATTCATC
AGTGACATAGTGTGACCTTCGGATCACGGAGAAGAGTGAGACAGATCAGCCATTCACCCAGGAGT
GGCACAGACCCGGGGGAATCCCCCTACAAGAAAATGGTGAGTGAGTGAGAGTCCCGTGGGATGCA
TATTTCTGCCACGAACCTTTGAATCCCTGGGCTCANGAGATACCCCAGCTGGGGTCTCCAGACCAA
AACAGAGAGCCATGTGGAGTCTGGGTAGAGCTGCTTCTTANGTAGGTGTGGAGTCCCAGTAGCAT
TTGTTCCCTGGGNACCTGCCCG

| | |
|---|---|
| Sequence 185 | cMhvSD019b10a1 |

NNANATCAAGCTTATCNATCCCGCNACCTCNAGGGGGGGCCC

| | |
|---|---|
| Sequence 186 | cMhvSD019c04a1 |

AGGTACGCGGGAGATTATGAAAATCGCGAGTCAACACCCAAACTGGCAAAATTACTGAAACTACT
ACTTTGGGCTCAGAACGAGCTGGACCAGAAGAAAGTAAAATATCCCAAAATGACAGACCTCAGCA
AGGGTGTGATTGAGGAGCCCAAGTAGCGCCTGCGCTTGCGTGGTGGATCCAACACCAACCCTGCG
TCGTGGGACTTGCCTCAGATCAGCCTGCGACTGCAAGATTCTTACTGCAGTAGAGAACTCTTTTTCT
CCCTTGTACGCGGGACCTGGACGAAGGCTTGTCCTACACGAGCATCTTCTATCCGGTTGAAGTTTT
TGAGAGTTCGCTTTCAGATCCTGGGCCCGGAAAGCAAGA

| | |
|---|---|
| Sequence 187 | cMhvSD019f07a1 |

GGTCTCGGTCACTCGAATAACCCGACATGGCGTCAATGGTTGCGGTTGGCGGGGAACGAAGTATA
TAGAAAAGCGTGCGACAAGTCGCTGGAAATGGCCTCGATGACGGCGAAGCCTTGCGGGGGCGGCA
GCGGAGGAAGGACACCGATGACACCAGCCGAAGCTGCACTACTAGAGACCGGTAGAAATGAATG
AGGTCCCCCGCGTACCTCGGCCGCCCGGGCAGGTACGCGGGGGCCAGCGTCACCAGACCAGCTGC
GGGACAAACCACTCAGACTGCTTGTAGGACAAATACTTCTGACATTTTCGTTTAAGCA

| | |
|---|---|
| Sequence 188 | cMhvSD019f08a1 |

AGGTACTAGCAGTAATTGATTCACTGGCCTTGGACTACTTGCAGGTCAGCTTGTCTCACATAACAG
GTTGGTATATGTATAACTATCACATAATTATGCATTTTAGTAAAAATAATTGTTTAGAACTGGCTTC
GGGCAGTTGTGACCTCTAACTGTAATTTCCTTGCTTCTTCTGTATGTTTCCACCTCTTGTGCTGTGCG
CCTAGCCAAATCAGGGTGCTCTTGATAAAAATTCTTCTCAAATTTAGGCAGCTCATCAAGATTCCA
CTTCTTTTTAACTAAATTTCTCCCCAGGGTTT

| | |
|---|---|
| Sequence 189 | cMhvSD021a11a1 |

CCGGGCAGGTACATTTCCTGAGCAGGTGATCCTGGCTGTCTGTCCTGGAGACACTGACACTGAAGA
TGGCTGTGTCAGCTCATAGGAGGCCACAGAGACTGTGCAGAGAATGAGGAGGGGGAGCAGGAGA
GGGATCCAGGCCATGGTGAGACATTCAGAGCTCTGCCTCCTGAGCCTACAGCCCCCGCGTACCTCG
GCCGCCCGGGCAGGTACTTTAATAGCTCAAACTCAGAGTCATCGTGCTCCCAATTCCAAAGAGATT
CCTAAAAGAGGCAACTT

| | |
|---|---|
| Sequence 190 | cMhvSD022b06a1 |

CCGGGCAGGTACCTTCTGGGGCATACAACATGGCAGCAGGGCCTCGGGAAGAGGGGTAGGAGGA
CCGAGCAGCATTCTCTGTAGAGGAAGACAGGAAAGGAGACCCTCTTGGCACACATTTATGGAGGG
TTGTCCCTGAAGAGAAGGGCAGGTGGGAGAGGTTCCCTGTTACTTAAGAGAAGGCACCAGTGGCA
AAGAGCACAATGAAGAGGATGATGATAAAAACAATCACGCAGATAAGGACAATCATCTTCACGTT
CTTCCACCAGAATTTTCGAGCCACCTTCTGCGATGTCGTCTTGAAGTGCTCAGATGTGGCTTCCAGA
TCCTCTGTCTTGTTGCGGAGATGTTCCAAGTTTTCCCCCCGGGCCAGGATCCGCTCCACATTCTGGG
TCATAATATTCTTAACTCCCTCCACCTCACTTTGCAGGTTCCGCACACGATCATTTCCTCCACCTTC
ACTGGCTTCCTCCATGTCTCAAAACAAGTCCAAGCCGGTCAGTAAAGTGAATTCGCCTAGTCGGCT
TTCCTCCAAGGTGGCCCTCANTTCACTTCCTGCTTGCTTCAACTTTTANCCTGCCCCCGCCCCCGNG
TACCTTTGGGCCGNTTTANNAACTAGTGGATCCCCCG

| | |
|---|---|
| Sequence 191 | cMhvSD022f04a1 |

CGCACAGTAACAGTAATAGTCAGCCTCATCCTCAACGTGGGCCCCACTGATGGTCAAGGTGACTGT
GGTCCGTGAACTGGAGCCGGAGAATCGCTCAGAGATCCCTGAGGGCCGCTCGCTGTCTTTATACAT
CACTAACACAGGGGCCTGGCCTGGCTTCTGCTGGAACCACCGAGCATCTTTTTTTGCCAGTACCTC
GGCCGGGACCGAGGGTTTGGTGCACCTCGATTTGGAGGAAGTAGGGCAGGGCCCTTATCTGGAAA
GAAGTTTGGAAACCCTGGGGAGAAATTAGTTAAAAAGAAGTGGAATCTTGATGAGCTGCCTAAAT
TTGAGAAGAATTTTTATCAAGAGCACCCTGATTTGGCTAGGCGCACAGCACAAGAGGTGGAAACA
TACAGAAGAAGCAAGGAAATTACAAGTTAGAGGTCACAACTGCCCGAACCAGTTCTAAACAATTA
TTTTTACTAAAATGCATAATTATGTGATAGTTATACATATACCAACCTGTTATGTGAGAACAAAGC
TGANCTGCAAGTANTTCCAAGGCNAGTGAATTAATTACTGGTTGTACCCTCGGGCCGNTCTAGAAC
TAATTGGATNCCCCCGGCTTGCAAGGAATTCGATATTAAAGCTTATTCGAATACCGGCCAACCTNN
AAGGGGGGGNC

| | |
|---|---|
| Sequence 192 | cMhvSD025a09a1 |

CNCGGTGGCGGCCCGAGGTACTGTNTAACTGGATGCTGCCCTGGTTNCTGAAGGCACTTTTCATGA
TGCTGTCCAGGGTCATCAGGGAGACATGTTGAAAGAGCTCCAGACGTGAGTTTTGGGCAATGTGTT
CCTCCCATTTGTTCAGCATCATCCGAACACTCTTAGACATCATGGTGATGAATATTTTCAGAATGCT
GATGTTGAAGCCAGGTTTCACAATCTGGCGGTGCTTTTTCCATTTAGAACCATCCAGGGTCACAAG
TCCTCGACC

| | |
|---|---|
| Sequence 193 | cMhvSD025d09a1 |

GGCGAATTGGAGTTCCCCGCGGTGGCGGCCGAGGTACTCTGCGTTGTTACCACAGGCGATGACAG
CTCCATGTGTGTTATTNNCCCTGAAGACCTTCCAGAGACAAAATGTGGAGGTGGAAGACAGTGAT
ACTGATGACCCTGACCCTGTGTGGATCTAGGCTAACATGTGTTTTTGTGTCTTAGTTTTCAACAAAA
AAGTTTAAAAAGTTAAAATACTAAGTTTATAAAGTTAAAAAGTTACCCCGCGTACCTGCCCG

| | |
|---|---|
| Sequence 194 | cMhvSD025f12a1 |

AGGGCGAATTGGAGCTCCCCGCGGTGGCGGCCGAGGTACTCTGCGTTGTTACCACAGGCGATGAC
AGCTCCATGTGTGTTATTGCCCCTGAAGACCTTCCAGAGACAAAATGTGGAGGTGGAAGACAGTG
ATACTGATGACCCTGACCCTGTGTGGATCTAGGCTAACATGTGTTTTTGTGTCTTAGTTTTCAACAA
AAAAGTTTAAAAAGTTAAAATACTAAGTTTATAAAGTTAAAAAGTTACCCCGCGTACCTGCCCG

| | |
|---|---|
| Sequence 195 | cMhvSD025g04a1 |

CGGCGAATTGGNTTTNCACACGCGGTGGCGGCCCGAGGTACCAAGGAGAAGACTTGAACCAAAAA
CAAACTCTTCAAGTATATTCATTCATTCAACAAAATTTTTGCATGCCTTCTATGTCGTAGGCATTTT
TAGTTCCTGGGGATTTGGACATGGCTAAGTCAGAGAAGGCCATTGCTCACCATGAACACTGTATAC
CAGAAGGAGAGTGGGGAGGAGACAAAAAACAAATAAGACCACTTCAGACAATCAAAGTATCAGT
TAAGAGAATGAAAACAGGCCTGACTCAGTGGCTCACGCCTGTAATCCCAGTACCTGCCCG

| | |
|---|---|
| Sequence 196 | cMhvSD025h04a1 |

CGCGGTGGCGGCCCGCCCGGGCAGGTACAAGGCAAATACTGCTTTATTTTTCCTTCAGCTTTTCTC
AAGCAGAAGAAGTCTCTCACTATAGCCACCACAGCTGGCAATATGCTGGGTCTCACCTGGAGCCG
GAAAGTCTCAGAGTCTCACCCAAGGCCCATGGTATACTACTTGGATATTGCTGCTGGTTATTCAAG
GCCCAAGGGATCTTTAGTCAGCAGGTGACGTATTCCGCAAGGACTGGGTCCTTTCCTTCATGGCAG
CAGGTTCCCTTCTGGCCCAGGGTGTTTCTAAAAATGGTTTCTGGGAGCTAGGAATCCCCACTCATC
AAAGAGGACTTCAATGCAAGACAAAGTCCTCTTTACTCTTCTCCCTCCTCTCCCAAGAGGAAGGAA
GGGTCTCTTTTGGAAGTCAGGAGCTGCATTCCCTGGGGTTGGGGAANGGGTAGTACCTTGGCCGCT
CTA

| | |
|---|---|
| Sequence 197 | cMhvSD025h05a1 |

CGCCCGGGCAGGTACAAGCAGTAATTGATTCACTGGCCTTGGACTACTTGCAGGTCAGCTTGTCTC
ACATAACAGGTTGGTATATGTATAACTATCACATAATTATGCATTTTAGTAAAAATAATTGTTTAG
AACTGGCTTCGGGCAGTTGTGACCTCTAACTGTAATTTCCTTGCTTCTTCTGTATGTTTCCACCTCTT
GTGCTGTGCGCCTAGCCAAATCAGGGTGCTCTTGATAAAAATTCTTCTCAAATTTAGGCAGCTCAT
CAAGATTCCACTTCTTTTTAACTAATTTCTCCCCAGGGTTTCCAAACTTCTTTCCAGATAAGGGCCC
TGCCCTACTTCCTCCAAATCGAGGTGCACCAAACCCTCGGTCC

| | |
|---|---|
| Sequence 198 | cMhvSD026c04a1 |

TTAATACGACTACTATAGGGTTAATTGGAGCTCCCCGCGGTGGCGGCCGAGGTACTTGTTGTTGCT
TTGTTTGGAGGGTGTGGTGGTCTCCACTCCCGCCTTGACGGGGCTGCTATCTGCCTTCCAGGCCACT
GTCACGGCTCCCGGGTAGAAGTCACTTATGAGACACACCAGTGTGGCCTTGTTGGCTTGAAAGCTC
CTTCAGAAGGAGGGGTGGGAACAGAGTTGACCCGAGGGGGCAGCCTTGGGCTGACCTANGACGGT
CAGCTTGGTCCCTCCGCCGAACACCCAAGTGCTACCATCTCCATATGAGCAGCAGTAATAATCAGC
CTCGTCTTCAGCCTGGAGCCCATAGATTGTCAGGGTAGGCNCGTNGTTGCCAGGACTTTGGAGCCA
AGAGAAGNCGAATTAAGAAAACCCCTTGAAGGGGCNCGCTTACTT

| | |
|---|---|
| Sequence 199 | cMhvSD026c09a1 |

CCGCGGTGGCGGCCGAGGTACCTACGCTATCAGGAGGCCCTGAGTGAGCTGGCCACTGCGGTTAA
AGCACGAATTGGGAGCTCTCAGCGACATCACCAGTCAGCAGCCAAAGACCTAACTCAGTCCCCTG
AGGTCTCCCCAACAACCATCCAGGTGACATACCTCCCCTCCAGTCAGAAGAGTAAACGTGCCAAG
CACTTCCTTGAATTGAAGAGCTTTAAGGATAACTATAACACATTGGAGAGTACCTGCCCG

| | |
|---|---|
| Sequence 200 | cMhvSD026c09a1 |

GCTTTTGTTTCCCTTTAAGTGAGNGGTTAAATTGCCGCCGCTTGGGCGTTAATCATGGGT

| | |
|---|---|
| Sequence 201 | cMhvSD026d02a1 |

GCTGTTATGCTCATCATGGCACTTAAGAGATGCTTAACAAACCTTTCCTACAATGTTCCTCAGATTT
TCAGAGCTTATTTGATCTAGCATCTGGTTCCTAAATTCTGAGTCACATCAGAAGCCAAACTTGAAT
GCTTTTGGAAAGAGCTAGCCTCATACCACTTCAAGTTGGGGAAGGGGGAGTACCTCGGCCCGCTCT
AGAAACTAGTG

| | |
|---|---|
| Sequence 202 | cMhvSD026d02a1 |

CGCTTGGCCGTAATCATGGTCATAGCCTGTTTCCTGTGTGGAAATTGTTATCCGCTTCACAATTTCC
ACCACCAACCATAACGAAGCCCGGGG

| | |
|---|---|
| Sequence 203 | cMhvSD026d07a1 |

CCGCGGTGGCGGCCGCCCGGGCAGGTACTTTTTTTGTGATTTTTGAATGCACGTGCGCAGGAAGGG
CTCCTCTTAGAGAAGCAGTCAAACTGTGAAGCACTAAGCTGACCCTGCTTCAAGCAATTTTGTTTT
TACAACTGTTCCTTTCACAAGCAAGCCTTAAAAAAAAAAANNAANTAAAAAANAAAGTACCTCGG
CCCGCTCTAGAACTAGTG

| | |
|---|---|
| Sequence 204 | cMhvSD026d07a1 |

AGCTGTTTCCTGTGTTGAAATTGTTATTCCCGCTCNCCAATTTCCACACAAACANTACCGAAGCCC
GGGGAG

| | |
|---|---|
| Sequence 205 | cMhvSD026d09a1 |

ACACTACTTAGGGCGAATTGGAGCTCCCCGCGGTGGCGGCCGCGGTCTCGGTCACTCGAATAACCC
GACATGGCGTCAATGGTTGCGGTTGGCGGGGAACGAAGTATATAGAAAAGCGTGCGACAAGTCGC
TGGAAATGGCCTCGATGACGGCGAAGCCTTGCGGGGGCGGCAGCGGAGGAAGGACACCGATGAC
ACCAGCCCGAAGCTGCACTACTAGAGACCGGTAGAAATGAATGAGGCCCCCGCGTACCT

| | |
|---|---|
| Sequence 206 | cMhvSD026d09a1 |

CTTGGCCGTTAATCATGGGTCATTAGGCTGTTTTCCTGTGGTGAAAATTGTTATC

| | |
|---|---|
| Sequence 207 | cMhvSD026f02a1 |

AGGTGCAGAAAACTCTCCTCATCTGGACCCGTGACGTCCTTGCAGCCCGAGTTGGCCATATCCCAC
TACGCCCCTGCACTGGAGCCTGAAGCAAAGTGTAAGGAACGGCCAGAGAGCGCAACACTGGGGCC
CACTACCCCGGCGCAAGTGACCCGCCGCCCCCGCGTACCTGCCCGGGCGGC

| | |
|---|---|
| Sequence 208 | cMhvSD026f02a1 |

GCTGTTTCCTGTGTGAAAATTGGTTATCCGCTCACAATTTCCACACAACATTACGAAGCCGGGGGAG

| | |
|---|---|
| Sequence 209 | cMhvSD027a02a1 |

GCTNATTGGAGCTCCCCGCGGTGGCGGCCGAGGTACGCGGGGGAGTCCTTGGAGCGCTGTGTTNTT
TACCGTGGTGGTGACTGGATCCAGGAGGTCGAGAGTCGTTCTTCTCTTTGCACAGACGTGACTCTG
CAGCTCTTTAACGGCGCCCGCTGCTCTCAACCCAGCTTACCCCACGTGGTCCCATGGCGGCGGCCG
CTCTAGAACTAAGTGGATCCCCCGGGCTGCAAGGAAATNCTATATCAAGCTTATCGATACCGTA

| | |
|---|---|
| Sequence 210 | cMhvSD027a10a1 |

CCGCGGTGGCGGCCGAGGTACCCTTATTCGCCTCTTTGACACACAATCCAAGGAGAAACTGGTGG
AGCTGCGCCGAGGCACTGACCCTGCCACCCTCTACTGCATTAACTTCAGCCACGACTCCTCCTTCCT
CTGCGCTTCCAGTGATAAGGGTACCTGCCCGGGCGGCCGCGGTCTCGGTCACTCGAATAACCCGAC
ATGGTGTCAATGGTTGCGGTTGGCGGGGAACGAAGTATATAGAAAAGCGTGCGACAAGTCGCTGG
AAATGGCCTCGATGACGGCGAAGCCTTGCGGGGGCGGCAGCGGAGGAAGGACACCGATGACACC
AGCCGAAGCTGCACTACTAGAGACCGGTTAGAAATGAATGAGGTCCCCGCGTACCTCGGCCGCTC
TAGGAACTAGTGGATCCCCCGGGCNTGCAGG

| | |
|---|---|
| Sequence 211 | cMhvSD027f02a1 |

GGGCGAATTGGAGCTCCCCGCGGTGGCGGCCGCCCGGGCAGGTACAAAGCAGACTGCCCGCAAAT
CGACCGGTGGTAAAGCACCCAGGAAGCAACTGGCTACAAAAGCCGCTCGCAAGAGTGCGCCCTCT
ACTGGAGGGGTGAAGAAACCTCATCGTTACAGGCCTGGTACTGGGAAAAGATCTAATCTGCCGTG
GGCCTGTCGTGCCAGTCCTGGGGGCGAGATCGGGGTAGAAATGCATTTTATTCTTTAAGTTCACGT
AAGATACAAGTTTCAGGCAGGGTCTGAAGGACTGGATTGGCCAAACATCAGACCTGTCTTCCAAG
GAGGCCAAGTCCTGGCTACATCCCAGCCTGTGGTTACAGTGCAGACAGGCCATGTGAGCCACCGC
TGCCAGCACAGAGCGTCCTTCCCCCTGTAGACTAGTGCCGTAGGGAGTACCTCGGCCGC

| | |
|---|---|
| Sequence 212 | cMhvSD027f09a1 |

ACTTAGGGCGAATTGGAGCTCCCCGCGGTGGCGGCCGAGGTACCCACAGCTGGGAGAGAGCTAGT
GAGCTCCAGGGAGGGTCANCTGGGGGAGTTTCACCATTGGCTGTGTCAGCCAATGGCAAGGTGTG
TGAACAGGGAACTCCTGTGTTGAGCATAGAGAGGAANAANATGCNTCCGAGATGGANTTGGGGA
ANGCAAGCACTTGCCGTGTTTGTGTGTCCNGAGACTCGGGCTGNTNATGANGAGCANGAGGGAGC
GTATGAAGATATCANATNTGCAAAGGACAAAACCCCCACCCAATTACAGGACCACTGANCCTNTA
GCTATGGAAGTCTTAANTACAGATTGCCTGGGCCGGGTGGATTTTC

| | |
|---|---|
| Sequence 213 | cMhvSD027g04a1 |

TCCTTAGGGCGAATTGGAGCTCCCCGCGGTGGCGGCCGAGGTACACCAGCGAATTCATACAGGTG
AGAGACCTTATATATGCAATGAATGTGGAAAAGGCTTCATTCAGAAGACGTGTCTCATAGCACATC
AGAGATTTCACACAGGAAAGACGCCCTTTGTGTGCAGTGAATGTGGAAAATCCTGTTCTCAGAAA
ATCAGGTCTCATTAAACATCAAAGAATTCACACAGGAGAGAAACCCTTTGAATGTAGTGAATGTG
GGAAAGCCTTTAGCACAAAGCAAAAGCCCATTGTCCATCAAAGGACTCATACAGGAGAGAGACCC
TATGGCTGTAACGAGTGTGGGAAAGCGTTTGCNGTATATGTCGTGTCTGGTTAAGCATAAGAGAAT
ACACACAAGGGAGAAACAAGAGGCAGCCAAGGTGGAAAAT

| | |
|---|---|
| Sequence 214 | cMhvSD029b07a1 |

CCAGCAGAAGCCAGGCCAGGCCCCTGTGTTAGTGATGTATAAAGACAGCGAGCGGCCCTCAGGGA
TCTCTGAGCGATTCTCCGGCTCCAGTTCACGGACCACAGTCACCTTGACCATCAGTGGGGCCCACG
TTGANNATGAGGCTGACTATTACTGTTACTGTGCGGCCGCCCGGGCAGGTACGCGGGGAGTCGGG
CCGCGCCGCGCCTCAGCTCTGGTTGATGATAATTAGAAGCATGCTTTCCACTGAACTTCCCGACAA
CATTTGTTATGCAGAATGTCTCTGAGTGAGAACTCGGTTTTTGCCTATGAATCTTCTGTGCATAGCAC

| | |
|---|---|
| Sequence 215 | cMhvSD030c12a1 |

ANCAACTAACCGCTCCGTGAACTCCACATCGTTCTCAAATTCTGGGAAGTGTTCCATCTCAATTCC
AACCATGAGGTACCTGCCCGGACCTGCCCGGGCGGCCGCTCTNGAAACTAGTAGGATCCCCCCGG
GGCTTGCATGGAATTNGATATCAAAGCTTTATCCGATACCN

| | |
|---|---|
| Sequence 216 | cMhvSD030f04a1 |

AGGTACTTGTTGTTGCTTTGTTTGGAGGGTGTGGTGGTCTCCACTCCCGCCTTGACGGGGCTGCTAT
CTGCCTTCCAGGCCACTGTCACGGCTCCCGGGTAGAAGTCACTTATGAGACACACCAGTGTGGCCT
TGTTGGCTTGAAGCTCCTCAGAGGAGGGCGGGAACAGAGTGACCGAGGGGGCAGCCTTGGGCTGA
CCTAGGACGGTCAGTTTTGGTCCCTCCGCCGAACACCCAAATGCCATTACTCGAGCCGGCCGCCCG
GGCAGGTACCGCGGGCTGGTGACCTCAGCCAAGAATGAATTCAGGCCATCCGGCTACAAGGCCAA
AAGCTTTNCCCAGCTTANCTACTTTGAACCACCCTGCTTTCTGGNTTTTTCTGGTTTCCACTTGCAA
AAATTGGGANGGGTGTTTTGNTCCTTTTTCCCTTGGGCNTTCCAAACAATTCAAATTTTAAAAA

| | |
|---|---|
| Sequence 217 | cMhvSD030g01a1 |

GGCGAATTGGAGCTCCACTCGCGGTGGCGGCCGAGGTACTGTCCAACTGGATGCTGCCCTGGTGG
CTGAAGGCACACTTCATGATGCTGTCCAGGGTCATCAGGGAGACATGTTGAAAGAGCTCCAGACG
TGAGTTTTGGGCAATGTGTTCCTCCCATTTGTTCAGCATCATCCGAACACTCTCAGACATCATGGTG
ATGAATATTTTCAGAATGCTGATGTTGAAAGCCAAGGGTTTNACAATCTGGCGGGTGNTTTTTT

| | |
|---|---|
| Sequence 218 | cMhvSD030h02a1 |

GGCGAATTGGAGCTCCCCGCGGTGGCGGCCGCCCGGGCAAGGTACATTCTTCTCAGCACCTTAGA
GCCCACTGATGCAGGCATACTGGGAACGACTAAGGACTCACCCAAGCTGGGTCTGCTCATGGTGC
TTCTTAGTATCATCTTCATGAATGGAAATCGGCCAGTGAGGCTGTCATCTGGGAGGTGCTGCGCAA
GTTGGGGCTGCGCCCTGGGATACATCATTCACTCTTTNGGGGACGTGAAGAAGCTCNTCACTGATG
AGTTTTGTGAAGCAAGAANTTACCCTCGGGCCGCTCTAGAAACTAAGTNGGATCCCCCGGGGCTG
CAGGAATTCGATATTCAAGGCCTTATCGGATTACCGTCTNACCCTCGAAGGGGGGGGGGCCCCGG
GTACCC

| | |
|---|---|
| Sequence 219 | cMhvSD031c07a1 |

AGGTACAGGACACAATGCCCCCAGAAAAGTAACAGCCGTCATTTATGCTAGAAAAGGAAGTGTCC
TCCAGAGCATAGAGAAAATAAGTTCCTCTGTTGATGCAACAACTGTTACTTCACAACAGTGTGTTT
TTAGAGACCAAGAACCAAAGATCCATAATGAGATGGCATCAACATCAGATAAAGGTGCCCAAGGA
AGAAATGACAAGAAAGATTCTCAAGGAAGAAGTAATAAGGCATTACATCTGAAGAGTGATGCTGA
ATTTAAAAAGATATTTGGCCTTACTAAGGATTTGAGAGTGTGCCTTACTCGAATTCCTGACCATTTG
ACCTCTGGAGAAGGTTTCGATTCCTTTAGCAGTTTGGTAAAGAGCGGTACCT

| | |
|---|---|
| Sequence 220 | cMhvSD032b02a1 |

CGAGGTACACAAGCTCCTGCATCAGTGCAGGACTCAGTCCCTGAGTGCTGGGCCTGTCACAGACAT
CGCCTTCTTTACTCCCACGCAGCCAGGTTGACAATCACAGACCCTTTCTACAGGGAACCTAAGACA
CCAATTTAACCTGGCCAGGCTGAGCTAGTGGGTCACAAGCTTGAAATCTGAGGTACCTGCCCG

| | |
|---|---|
| Sequence 221 | cMhvSD034b02a1 |

AGGTACCAATGTCTTGGGGGGAGGGAGCCAGCTGATTGTGAGATGTAAGTTTGTGATTCTGAGAT
ANCANCTTTGCAAAAAACTGCAATTTGTCAATTCACCAATATTGATAATGTGCAAGCTTGGTGAGC
TGAGAATATTCCTGAAAACCTTTGTTCCCACTGCGAATTCCTGGGGACAGTTATGAGTTCCTAATG
ACGTCACCACAAAGACATTTTGGAGTGTTTGGTAAAGGCTGTTTCTTTTCAGTGATTGCTGGAAGC
ANATGGGATCAAATAAAAATAGA

| | |
|---|---|
| Sequence 222 | cMhvSD034d09a1 |

AGGTACAGAGTGGACCATCTTATGAGGCCAAAAACCCATGAGTTACCAGATGACCATTCAGATAT
TTGGGTTAAACGATGACAGTTTTCTGGTTTAATCAAGGCACTTGCAAAGAGCTATCTTTGACATGA
CATGAAGTCCCTACGTGTTGTTAGCCATTAATGATGGCATGGTTTTTCTATACCAAGCATTCTATAA
CAAGAACCCAAGCCTGACAGTTTGATCACAAAGTCACTTATAACCCGCGTACCTGCCCGGGCGGC
CGCCCGGGCAGGTACGCGGGGGCCAGCCAAGATGGTTGCCCCCGCAGTGAAGGTTGCCCGAGGAT
GGTCGGGCCTGGCGTTGGGCGTGCGGCGGGCTGTCTTGCAGCTT

| | |
|---|---|
| Sequence 223 | cMhvSD041c11a1 |

ACTATAGGGCGAATTGGAGCTCACCGCGGTGGCGGCCGGGCCCGTGGAGGCCTAGGCTGGCCCTA
GGACCTTCTTGGTTTGCTCCTTGGATTCCCCTTCCCACTCCAGCACCCCAGCCAGCCTGGTACCTCG
GC

| | |
|---|---|
| Sequence 224 | cMhvSD042e09a1 |

TAGGGCNAATTGGAGCTCCCCGCGGTGGCGGCCGCCCGGNCAGGTACCAAAAAACATATTGGTTT
GGCAATGCATCTCCANANCAGGTGATCCTGGCCGTNTGTCCTGGGGACACTGACACCGAGGGNGG
CTGTATCANNTCATAAGAGGCCTCANAGCCTGNGCANANAGTGAGGATGGGGAGAAGTACAGGG
ATCCANGCCATGGNNANACACCCNGAGTTCTGCCTCCTGGACCCACCCCCGCGTACCT

| | |
|---|---|
| Sequence 225 | cMhvSD042e09a1 |

ACCTCGAGGGGGGGCCNGGTCCCAGCTTTTGTTCCCTTTAATGA

| | |
|---|---|
| Sequence 226 | cMhvSD043b06a1 |

NAATTGGAGCTCCCCGCGGTGGCGGCCCGCCCGGGCAGGTACGCGGGGACACCAAACAACTCATT
ACACAAAGAGGTAAGGTCCCAGACCACGCCAAAGCTTCCTGAGACCTCTCCTCATCTGTGCATGG
ACGGATGACCAACTCTGGGGCCCAGGCTGTTGCTTCCCAGTATAATGATGAATCCGCCATAGTCTG
GTGAGTGTAGAGGCTGACTCTGGAGCCCAGGCTGTACCT

| | |
|---|---|
| Sequence 227 | cMhvSD043h11a1 |

GGAGCTCCCCGCGGTGGCGGCCCGCCCGGGCAGGTACTTGGATTACAGGCGTGGACCAGCATGCC
ATGCCTATAGTGATATCTTTAAGTAACCCTCTCTTTTCTTCTTTTGAGCAATTTTTCAAAGCAACAG
GCATTTTATTAAATAAGAAAGTCGATGTGCTTTCCTAATGCCTGTTAATAAAGTAAGGAGCCAAGG
AACCTCTGTGATTTCAATGAAATCCCTCCAGATATTATAGGCTACTTGTTACTGACAAGTATGGCN
GGAACTGCANGTCAAGCTGTGATAGGCAAATAGATCTTGCTGAAGAGGAAGAATG

| | |
|---|---|
| Sequence 228 | cMhvSD044e12a1 |

GGGCGAATTGGAGCTCCCCGCGGTGGCGGCCGCCCGGGCAGGTACGCGGGGCCAGGCGGAAGCC
CGGCTCCGGGCCAGCATCCGAGAGCCCGGACTGGAGAGTCAACTTTTATAACACTGTTACTGGGA
ATACTTGACTTACTAAGCTTTTACTGAACACTTTAATTTTGGGAGTACCT

| | |
|---|---|
| Sequence 229 | cMhvSD044f12a1 |

AGGTACCGCTTTGTANGGGAAGGAGGAGTAAGGATGTCGGAGACCTGTGTCCAGGTGCACCGATG
CCAGACAGACGCTCCCATGTGGCTGAATGGGACCCACCCTGCCCTTGGGGATGGCATCACCAACC
ACACTGCCTGTGCCCATTGGAGTGGCAACTGCTGTTTCTGGAAAACAGAGGTGCTGGTGAAGGCCT
GCCCAGGCGGGTACCTGCCCGGGCGGCCGCCCGGCAGGTACTGTTTCTNAACCTGANCTGCATATT
GGAATCACCTGGGGAGCTTTNACAACTACATGATTCCTAGGACCCATCTCCANAAAGTCCAAAAT
AATTGCTCTGGGTGCAANCTGGACTGTGGGATTTTTAATCCCTTCCCTCCCTGANATTCTAATGTGC
AACCAGTGNNAAGNAACATCATCCTGTNNACCGTTTNCCAAACANGTGTGGATNTGGGCANACAG
GCTTGTCAAAATGCCTTTTCCCANATCCATCCCAAGACAACAAATTCATTANTTTTGGGGCAACTT
CCAAAATNTTACTTTTTTNTCAANTCCAANCCCCATTTTNATTTTTATNGAAGANGGCGTTNTAACA
AATTTAAAAA

| | |
|---|---|
| Sequence 230 | cMhvSD044h04a1 |

CCGGGCAGGTACTTTGAGCAAGGTCCGCAAGCAGGATGCCTGCACTTCTCCAGTCATGCTCCAGCA
CCAGGTCGGAAGCTGTCTACATGCGGGGATGGACCCTGGCATCCTGGGCTCACAAGGATAGGGCC
CTGAATATGGGCNNAGCCGANCNNNCTTGAGANGGNAGCTGCACCCACCCTGAGTGCCTCCCGTG
GTACCT

| | |
|---|---|
| Sequence 231 | cMhvSD045c04a1 |

CCGGGCAGGTACNCGGGGGCTGTANGCTCAAGAGGNACANNTCTGAATGTCTCACCATGGCCTGG
ATNCNTCTCCTGCTCCCCCTCCTAATTCTATGNACAGNNTNTGTGGCCTNCTATGAGCTGACACAG
CCATNCTCAGTGTCAGTGTCTCCGGTAGAGACAGCCAGGATCACCTGCTCAGGAAATGTACCT

| | |
|---|---|
| Sequence 232 | cMhvSD045c04a1 |

GATTNTGAAAATATTCATCACCATGATGTCTGANAGTGTTCGGATGATGCTGAACAAATGGGAGG
AACACATTGCCCAAAACTCACGTNTGGAGCTCTTTCAACATGTCTCCCTGATGACCCTGGACAGCA
TCATGAATGTGCCTTNNCCACCAGGGCANCATNCANTTGGACAGTACCTTGGCCGNTCTANAACTA
TGGATCCCCCGGCTGANGAATTNNANNTCAACTTATNNATCCNNNACTNNAGGGGGGCCCGGNCC
CNACTTTTG

| | |
|---|---|
| Sequence 233 | cMhvSD045c12a1 |

TTGGAGCTCCCCGCGGTGGCGGCCGGCCATGGAGGCTGATGGGGCCGGCGAGCAGATGAGACCGC
TACTCACCCGGGGTCCTGATGAAGAAGCTGTTGTGGATCTTGGCAAAACTAGCTCAACTGTGAACA
CCAAGTTTGAAAAAGAAGAACTAGAAAGTCATAGAGCTGTATATATTGGTGTTCACGTCCCGTTTA
GTAAAGAGAGTCGCCGGCGTCATAGGCATCGCGGACACAAAC

| | |
|---|---|
| Sequence 234 | cMhvSD046e04a1 |

GATTGGAGCTCCCCGCGGTGGCGGCCGAGGTACGCGGGGATGGCTGGCCAGAGGAGGAACGCTTT
GTGTTCTCATCGGAGCTGCATGGGAAGTCTGCATACAGCAAAGTGACCTGCATGCCTCACCTTATG
GAAAGGATGGTGGGCTCTGGCCTCCTGTGGCTGGCCTTGGTCTCCTGCATTCTGACCCAGGCATCT
GCAGTGCANCGAGGTTATGGAAACCCCATTGAAGCCAGTTCGTATGGGCTGGACCTGAACTGCGG
AGCTCCTGGCACCCCAGAGGCTCATGTCTGTTTTGACCCCTGTCAGAATTACACCCTCCTGGATGA
ACCCTTCCGAANCACAGAGAACTCAGCAGGGTCCCAGGGGTACGATAAAAACATGAGCGGCTGGT
ACCTGCCCGGGCGGNCGCCCGGGCANGTACTNANGTGTAAAGGGATTTATATGGGGACNTTGGCC
NATTTNCNGGTGTTGNCNGTTNCTCTTTTTAAGCTTATACTCATGAATCTTGTNTTAANCTTTTGAA
GGCANACTGCCNAAATNCTGGANAAATANNAGNTNGNNAANNNNGGGGGTTTTTTTT

| | |
|---|---|
| Sequence 235 | cMhvSD046g04a1 |

GGTGGCGGCCGCCCGGGCAGGTACCTCAGAAGCAAACCCAGTTCCTGCACACAGAAACCCCATTC
AGGCTCCTACTGCACTGAGAAGCACGTGTTCTCCATTTCCCTGGGGGAGACCATTGTATTGGGCAG
TTNGGAACAAAACACCATGGACTGGGA

| | |
|---|---|
| Sequence 236 | cMhvSD047e10a1 |

TTAGGGCGAATTGGAGCTCCCCGCGGTGGCGGCCGCACAAAAACCAATCTACCTGATGAAAACTC
CGTTCCCTTCTCGCCAGAAACATAAAATGCGATGGAGCTACGGCCACCGCTGCCGAGACAAAATG
GCGCCCCCCGCGTACCT

| | |
|---|---|
| Sequence 237 | cMhvSD048e11a1 |

TGGAGCTCCCCGCGGTGGCGGCCGNCNNNCCGGGTNCTCACCAAAATTGGGCCTGAGAAATTTGT
TATATCCTGCTGNGAGGTTCTCAAAGCCAGGCANGGAAAGCTTGTCACTTCTGCCGACCTCGACGT
TGAACTGACTCCTNTGGATGCACATCCTCTCAGTGAAGAGACTCANACACACGAAGGCCAAGTGG
AGGCTGCNNTTCATGTTGAGAAGCTGCTCACACCNANGNNCTGAAGTAAGAATCACNATGTANTT
NTTGAGGCTCTGTTAGGGCAAGTCCTTNAGGCCTACANGCAAGACTTCCAGGCAAGGCACGGTCTT
CTGGGTCCCCAGGGTTCTNCTCATNCTCAGCCCTGTCCCCTNNNATGTGGACACGCANCCACCCTC
AGATGGAGTGGCTCTCTGGGAAAGAATGGAGCTGCTAAACCTGTCTTGGCTCCANCCATGCAGGT
AAGGGGAGGGATTGCTTGGACGCTTGGCCTTGCACCCTGAGGGAGCTGGGAGCCANGAGGGACTC
ATATGGAAGGGCAGANAAAANANCTTANTGNNNGNTACCTGCCCCGGGCCGGCCNTGAACCATTT
ACTGTCGGTGTATTTAAACTGCACTTGGTAGACAACAAGCCTCGTGCTATTGCTCAAGGCCACTGC
TTCCAACTCAGGACCTGCTCTGCTTTGACCTCGGCCCTCTANAACTATGGATCCCCCGGCTGCANG
AATTCATTCAACTTATCGATTCCGTCGACNTCNAGGGGGGGCC

| | |
|---|---|
| Sequence 238 | cMhvSD053f10a1 |

TCACTATAGGGGCGAATTGGGAGCTCCACCGCGGTGGGCGGCCCGAGGTACAGCACCCGCTTGGC
TGTGCTGAGCAGCAGCCTGACCCATTGGAAGAAGCTGCCACCGCTGCCGTCTCTTACCAGCCAGCC
CCACCAAGTGCTGGCCAGTGAGCCCATCCCGTTCTCTGATTTGCAGCAGGTCTCCAGGATAGCTGC
TTATGCCTACAGTGCACTTTCTCAGATCCGTGTGGACGCAAAAGAGGAGCTGGTTGTCGACCAGAC
ACTATTTCAGCTAAAACCCCAGCTCGAAGACCAAAGAAGTGGGTTGGCTTGTCTCTGACAAGTCAC
GCTTTTGATTCTTTTACNGNCTTTGTGGGACACAAAGATGGGTGGAGATGGCTCANAAGTTGGGAG
CTGCTCTCCAGGTTGGGGAGGCACTGGTCTGGACCAAACCAGTTAAAGATCCCAAATCAAAACAC
CAGACCACTTTAACCAAGCAAACCTGCCAGTTTCCAGCAACCTNTGGGCTCTAATCAAAGCTTCTA
GGACAGGCAATGTCTTTAGCAGCTGNATACAAGGACGCTTCCNTTAAGTAGNAACCATNCAAGAG
CTTCCATGAAAGACCTTGGCAAGGTACCCTGCCCGGGCCGGGCGGTTCTAAAAACTNGTGGATTCC
CCCGGGGCCGGAAGGAATTCNATTTAAAAGCTTATTNGANACCCGCCNANCCTTGAAGGGGGGGGG

| | |
|---|---|
| Sequence 239 | cMhvSD054a11a1 |

CGCGGTGGCGGCCGAGGTACAGGAGGCCCGACAATTTGGTGACCAAGTGATGGCAGGCCACTCAG
CTTTGAGTAGCCATGTCCGCCACAGGCCCTGCGGCACATCTCANCTCCCTGGGTGCAGAATTCTGA
CATCATGGCCTTCATGCCCGTGCTCAGTGCGTGGAGCTGTGAGAACATGGAGGGGGGTTGGGCGG
TGTTAGGGGGCCTCCACCATAGGGGACCAACCCTGTGCACCACTTACTGAGCATCTACTCATGCCC
AGCTCAACTCTGAGGTCCCGCGTCCTGCCGGGCGGCCGCTCTA

| | |
|---|---|
| Sequence 240 | cMhvSD054e05a1 |

CCGGGCAGGTACCCAGGGAACAAATGCTACTGGGACTCCACACCTACCTAAGAAGCAGCTCTACC
CAGACTCCACATGGCTCTCTGTTTTGGTCTGGAGACCCCAGCTGGGGTATCTCCTGAGCCCAGGGA
TTCAAAGGTTCGTGGCAGAAATATGCATCCCACGGGACTCTCACTCACTCACCATTTTCTTGTAGG
GGGATTCCCCTGGGTCTGTGCCACTCCTGGGTGAATGGTTGATCTGTCTCACTCTTCTCCGTGATCC
GAAGGTCACACTATGTCACTGATGAATCCTTATGTGTCCACCTGGATGTTCCGGTTGAAGAGCTAG
TGTCTCACCACTCTTTCTGCTATTTGTGAGAGTGGCACACACTAGCTGCTTCTAGTCAACCATCTTG
GCCCCACCTCACTCACTTTTCTCAAGTAATCAAAGACCAGAAAGGATGTCCTTTACAAGAGCAGAT
CCCCCAAAATGTAAGAGTTCACTGAAAAGGTGGGAGCTCAAACCAAGAGAGGACCTATCTCGCAG
CATAAAGACAACTTGTACCTCGGCCGCTCTAGAACTA

| | |
|---|---|
| Sequence 241 | cMhvSD054g09a1 |

AGGTACAGTGTCTCCGTCCCGCGGAAAAAGAAGCCTCTGAACCCGCGCCGGCCCGCAGCCCCCGT
GCCTTCCGGCCGCCCGGGCAGGTACGCGGGGGCCGCGGAGACAAAGATGGCTGCGAGAGTCGGC
GCCTTCTCAAGAATGCCTGGGACAAGGAGCCAGTGCTGGTCNGTGTCCTTCGTCGTCGGGGGCCTC
GCTGTAATTCTACCCCCATTGAGCCCCTACTTCAAGTACCT

| | |
|---|---|
| Sequence 242 | cMhvSD054g09a1 |

AGTGAACTAACTCACATTAANTTGCNTTGGCGCCTCACTGGCCGCTTTTCAAGTNCNGGNAAACCT
GNTCNTGCCAGGCTGGCANTTAATTGAAATCGGGCCAAACGCCCCCGGGGAGAAGGCGGTTTTGC
GTATTTGGGCGGCTNTTTCCGC

| | |
|---|---|
| Sequence 243 | cMhvSD054h08a1 |

ACCGCGGTGGCGGCCCGAGGTACATGACGGGATTTCACTATGTTGGCCAGGCTGGTCTCAAATTCC
TGACCTCGTGACCCACGTGCCTTGGCCTGCCAACATGCTGGGATTGCAGGTGTGAGCCACCGCGCC
CGGCCCCAACTTCTCCTAATGTTGCTATTTTGATCTTATTTTTTAAATCATGAATGTTCTCAATGAC
ATCTAGAATGGTGAATCCTTTCCAGTAGGTTTTCAATTATTTTGCCCAGATCCATCAAAGGAATCA
CTTTCTAGAGAAGTTATAGCTTTATGAAATATATTTTTAAGTGATAAAGACTTGAAAGTTGCAATT
ATTCTTTGATCCAAGGGCACCAAGAATGAATGTTGGGTTAGTAGGCATGAAAACAATATTCAGCTC
TTTGTACCTGCCCG

| | |
|---|---|
| Sequence 244 | cMhvSD054h09a1 |

GGAGCTCCACCGCGGTGGGCGGCCGAGGTACAAGCAGTAATTGATTCACTGGCCTTGGGCTACTT
GCAGGTCAGCTTGTCTCACATAACAGGTTGGTATATGTATAACTATCACATAATTATGCATTTTAGT
AAAAATAATTGTTTAGAACTGGCTTCGGGCAGTTGTGACCTCTAACTGTAATTTCCTTGCTTCTTCT
GTATGTTTCCACCTCTTGTGCTGTGCGCCTAGCCAAATCAGGGTGCTCTTGATAAAAATTCTTCTCA
AATTTAGGCAGCTCATCAAGATTCCACTTCTTTTTAACTAATTTCTCCCCAGGGTTTCCAAACTTCT
TTCAGATAAGGGCCCTGCCCTACTTCCTCCAAATCGAGGTGCACCAAACCCTCGGTCCCGGCCGTG
CTTCTGCTATGGCGAAGGAGCCCTCGGCCTTCAACCACTGTGCCCACGCCTACCGGTTTTCTGGGG
ATGTTGCCACCACCTCTGAAGAGTGAAACCAAGCTTTTCATGCANGAAGAGCCAGGTGCTGGGGG
GCTTC

| | |
|---|---|
| Sequence 245 | cMhvSD055d06a1 |

TCTGAATGATCGCGTTGCTCGAGCTGCCGTTGGAAGCTTAGAAGCAGGTGCTACCGTGCTAGATAC
AAAGCGATCTATTTAAAAGCCCTCTGTCACGCACGCACACTTACTGACGAATCTTCTGGCTCTCTC
CTACCCCGCCCGGTGGCGGATTCCGGAATTGGTTCAAAAGGCCTTGATCCCGAACACCCAGGACA
GAGACAGAGTACCT

| | |
|---|---|
| Sequence 246 | cMhvSD055d10a1 |

CGAGGTACAAGCAGTAATTGATTCACTGGCCTTGGACTACTTGCAGGTCAAGCTTGTCTCACATAA
CAGGTTGGTATATGTATAACTATCACATAATTATGCATTTTAGTAAAAATAATTGTTTAGAACTGG
CTTCGGGCAGTTGTGACCTCTAACTGTAATTTCCTTGCTTCTTCTGTATGTTTCCACCTCTTGTGCTG
TGCGCCTAGCCAAATCAGGGTGCTCTTGATAAAAATTCTTCTCAAATTTAGGCAGCTCATCNAGAT
TCCACTTCTTTTTAACTAATTTCTCCCCAGGGTTTCCAAACTTCTTTCCAGATAAGGGCCCTGCCCT
ACTTCCTCCAAATCGAGGTGCACCAAACCCTCGGTCCCCGGCCGNTCTAAGAACTAATTGGATCCC
CCGGGCTGGCAGGAATTCGATATCCAAGCTTAATCGATCCCGTCGNACCTCGAGGGGGGGGCCC

| | |
|---|---|
| Sequence 247 | cMhvSD055g05a1 |

CGAGGTACTCTGCGTTGTTACCACAGGCGATGACAGCTCCATGTGTGTTATTGCCCCTGAAGACCT
TCCAGAGACAAAATGTGGAGGTGGAAGACAGTGATACTGATGACCCTGACCCTGTGTGGATCTAG
GCTAACATGTGTTNTTGTGTCTTAGTTTTCAACAAAAAAGTTTAAAAAGTTAAAATACTAAGTTTA
TAAAGTTAAAAAGTTACCCCGCGTCCTGCCCG

| | |
|---|---|
| Sequence 248 | cMhvSD055g05a1 |

ATCATGGNCATAGCTTGTTTCTGNTGTNAAATTGTTATCCGCTTCACAAATTCCCACACAAACATA
CNNAGCCCGGGAAGCATAAAAGTGTAAAGGCC

| | |
|---|---|
| Sequence 249 | cMhvSD059a06a1 |

GGGCGAATTGGAGCTCACCGCGGTGGCGGCCCGAGGTACGCGGGGATGCTGCGCCTCTCCGAACG
CAACATGAAGGTGCTCCTTGCCGCCGCCCTCATCGCGGGGTCCGTCTTCTTCCTGCTGCTGCCGGG
ACCTTCT

| | |
|---|---|
| Sequence 250 | cMhvSD059b04a1 |

NATTGGAGCTCCCCGCGGTGGCGGCCGAGGTACAAGTTGTCTTTATGCTGCGAGATAAGTCCTCTC
TTGGTTTGAGCTCCCACCTTTTCAGTGAACTCTTACATTTTGGGGGATCTGCTCTTGTAAAGGACAT
CCTTTCTGGTCTTTGATTACTTGAGAAAAGTGAGTGAGGTGGGGCCAAGATGGTTGACTAGAAGCA
GCTAGTGTGTGCCACTCTCACAAATAGCAGAAAGAGTGGTGAGACACTAGCTCTTCAACCGGAAC
ATCCAGGTGGACACATAAGGATTCATCAGTGACATAGTGTGACCTTCGGATCACGGAGAAGAGTG
AGACAGATCAGCCATTCACCCAGGAGTGGCACAGACCCAGGGGAATCCCCCTACAAGAAAATGGT
GAGTGAGTGAGAGTCCCGTGGGGATGCATATTTCTGCCACGAACCTTTGAATCCCTGGGCTCANGA
GATACCCCAGCT

| | |
|---|---|
| Sequence 251 | cMhvSD059b07a1 |

ATTGGAGCTCCCCGCGGTGGCGGCCGCCGGGCAGGTACAAGCAGTAATTGATTCACTGGCCTTGG
ACTACTTGCAGGTCAGCTTGTCTCACATAACAGGTTGGTATATGTATAACTATCACATAATTATGC
ATTTTAGTAAAAATAATTGTTTANAACTGGCTTCGGGCAGTTGTGACCTCTAACTGTAATTTCCTTG
CTTCTTCTGTATGTTTCCACCTCTTGTGCTGTGCGCCTAGCCAAATCAGGGTGCTCTTGATAAAAAT
TCTTCTCAAATTTAGGCAGCTCATCAAGATTCCACTTCTTTTTAACTAATTTCTCCCCAGGGTTTCC
AAACTTCTTTCCAGATAAGGGCCCTGCCCTACTTCCTCCAAATCGAGGTGCACCAAACCCTCGGTCC

| | |
|---|---|
| Sequence 252 | cMhvSD059c11a1 |

AATTGGAGCTCCCCGCGGTGGCGGCCGCCCGGGCAGGTACCACATGCCTGTAATCCCAGCTACTTG
GAAGCTGAGGCAGGAGAATCTCTTGAACTTGGAAGGCGGAGGTTGCAGTGAACCAAAATCACGCC
ACAGCACTCCAGCCTGGGAGACAGAGCAAGGCTTAGTTTTAAAAAAAAAATCAAATATTGTGTGA
TTCTGTTTATAGGAAATATTCANAATTGGTAAGTCCATAAGGACAAAAACCAGATTGACAGGGGC
TGAGATGAAAAAGAGAATGGGGTATGGGGAGTGACAGCTTGATAGGTATGGGTTTTGTTGGGGGG
AGATAATGAAAACATTTGGAACTAGGAGAATCACCTGACATCAGGAGTTCAAGACCACTGAACTC
GAACCTGGGTGACAGANTGAGACTCCGTCTCAAAAAAAAAAAAAATGTTTGGAACTANATGGTGG
TGGTTGTACCT

| | |
|---|---|
| Sequence 253 | cMhvSD059c12a1 |

TTGGAGCTCCCCGCGGTGGCGGCCGCCCGGGCAGGTACTGTGGGTGGGACAAAATATTTTTTCAGA
TTTTTAGACTTGGAATATGATTCCTGCTGTCTAGCAGAATAAGAAGAAGATAATGGCAGGAGGAC
AGCACGGACTAAACTCCAAGCANAAAAAAACAAAAAGATCAAATTTAAGACCTTTTTGGTGAGCC
CGTTTTAATCCTGGTCCTACTCTGTCCCAAATTTCTACATCAAGACTGCCTGTCTGTGGAAACCACG
GGT

| | |
|---|---|
| Sequence 254 | cMhvSD059d04a1 |

GGCNGATTGGAGCTCCCCGCGGTGGCGGCCGAGGTACAAGTTGTCTTTATGCTGCGAGATAAGTCC
TCTCTTGGTTTGAGCTCCCACCTTTTCAGTGAACTCTTACATTTTGGGGGATCTGCTCTTGTAAAGG
ACATCCTTTCTGGTCTTTGATTACTTGAGAAAAGTGAGTGAGGTGGGGCCAAGATGGTTGACTAGA
AGCAGCTAGTGTGTGCCACTCTCACAAATAGCAGAAAGAGTGGTGAGACACTAGCTCTTCAACCG
GAACATCCAGGTGGACACATAAGGATTCATCAGTGACATAGTGTGACCTTCGGATCACGGAGAAG
AGTGAGACAGATCAGCCATTCACCCAGGAGTGGCACAGACCCAGGGGAATCCCCCTACAAGAAAA
TGGTGAGTGAGTGAGAGTCCCGTGGGATGCATATTTCTGCCACGAACCTTTGAATCCCTGGGCTCA

| | |
|---|---|
| Sequence 255 | cMhvSD059d06a1 |

AATTGGAGCTCCCCGCGGTGGCGGCCCGAGGTACATCATTTCCAGAGCAGGCACTGGCAGCGAGA
TAGGGTTGGAGGAGAAGTAGCGCCGGGACTTCCGGATGGCAAACTTCTCTGTGGGTAGAGATTTC
CCAGCAATCTTGAGCTTCAGGCCTGGACAGCTCGAAATAATTCCACTTCGTCGTCCCCGAACGGCT
TGTGGTCCTCCTTCCCAAACATGCTGAGGTAGGCGGCCTTCATGTAAATGTAGGTGGCCTTTTTAA
GTCAGATCATGTCAGTTCCTTCTGGAAATCTGGTTATATTCCATCACACTCAGGAGACATCTCCTAC
AATTTCCTTGACACCTGCAGCACTCCAGCCACACGACGGCCTCAGGGCGGTTCCCAGGACACATCA
AACACACTCCTGCCCTGCTGTGCCCTGCCCANCTCCCTCTCCCCGCGTACCTGCCCG

| | |
|---|---|
| Sequence 256 | cMhvSD059d10a1 |

TAGGGCGAATTGGAGCTCCCCGCGGTGGCGGCCGCCCGGGCAGGTACCCAGGGAACAAATGCTAC
TGGGACTCCACACCTACCTAAGAAGCAGCTCTACCCAGACTCCACATGGCTCTCTGTTTTGGTCTG
GAGACCCCAGCTGGGGTATCTCCTGAGCCCAGGGATTCAAAGGTTCGTGGCAGAAATATGCATCC
CACGGGACTCTCACTCACTCACCATTTTCTTGTAGGGGGATTCCCCTGGGTCTGTGCCACTCCTGGG
TGAATGGTTGATCTGTCTCACTCTTCTCCGTGATCCGAAGGTCACACTATGTCACTGATGAATCCTT
ATGTGTCCACCTGGATGTTCCGGTTGAAGAGCTAGTGTCTCACCACTCTTCCTGCTATTTGTGAGAG
TGGCACACACTAGCTGCTTCTAGTCAACCATC

| | |
|---|---|
| Sequence 257 | cMhvSD059g02a1 |

GGGCNAATTGGAGCTCCCCGCGGTGGCGGCCGAGGTACTGTCCAACTGGATGCTGCCCTGGTGGC
TGAAGGCACACTTCATGATGCTGTCCAGGGTCATCAGGGAGACATGTTGAAAGAGCTCCAGACGT
GAGTTTTGGGCAATGTGTTCCTCCCATTTGTTCAGCATCATCCGAACACTCTTAGACATCATGGTGA
TGAATATTTTCAGAATGCTGATGTTGAAGCCAGGTTTCACAATCTGGCGGNGCTTTTTCCATTTAGA
ACCATCCAGGGTCACAAGTCCTCGACCAACCCAGGATTCAAGGATTTTGTGGCTAACAGCACTTTT
GGGATCTTGTCTTTTCAGGAGAATCTTGACATAGTCTGGGTCATGGATATTGAAGAACATCGTAAA
GGGTCCAACCCACAAGGGAACGGCACATGGGTATTTTTCCATCAGCTCAGGATCACCTCAAACTCT
TTTACTGGGTAAGAC

| | |
|---|---|
| Sequence 258 | cMhvSD060a05a1 |

GCGAATTGGAGCTCCACCCGCGGTGGCGGCCCGAGGTACAAGCAGTAATTGATTCACTGGCCTTG
GACTACTTGCAGGTCAGCTTGTCTCACATAACAGGTTGGTATATGTATAACTATCACATAATTATG
CATTTTAGTAAAAATAATTGTTTAGAACTGGCTTCGGGCAGTTGTGACCTCTAACTGTAATTTCCTT
GCTTCTTCTGTATGTTTCCACCTCTTGTGCTGTGCGCCTAGCCAAATCAGGGTGCTCTTGATAAAAA
TTCTTCTCAAATTTAGGCAGCTCATCAAGATTCCACTTCTTTTTAACTAATTTCTCCCCAGGGTTTCC
AAACTTCTTTCCAGATAAGGGCCCTGCCCTACTTCCTCCAAATCGAGGTGCACCAAACCCTCGGTCC

| | |
|---|---|
| Sequence 259 | cMhvSD061a11a1 |

AGGTACAGGACATTCCTCTGCTCCTATTGCCCCTGTTTCCGTTCTTTTCACACTGTCTGTGGGTGCT
GTGCCCTGTTGGAACTCTCTTTAACGTCTTACGTTGGAGCCGCTAACCTTCCCCAGGTGTTTGCTTC
ATTGCTTTCACAGGGAAAGAATTACTCGTCCCACTGACGAGTTCTATGTATGTCCCTGGGAAGCTG
CATGATGTGGAACACGTGCTCATCGATGTGGGAACTGGGTACCTGCCCG

| | |
|---|---|
| Sequence 260 | cMhvSD061e08a1 |

GCGAGGTNCTNTNCGNNGTTNCCACACGCGATGACAGNTCCATGTGTGTTATTGCCCCTGAAGACC
TTCCAGAGACAAAATGTGGAGGTGGAAGACAGTGATACTGATGACCCTGACCCTGTGTGGATCTA
GGCTAACATGTGTTTTTGTGTCTTAGTTTTCAACAAAAAAGTTTAAAAAGTTAAAATACTAAGTTT
ATAAAGTTAAAAAGTTACCCCGCGTACCTGCCCG

| | |
|---|---|
| Sequence 261 | cMhvSD061g11a1 |

CCGGGCAGGTACTGTCCAACTGGATGCTGCCCTGGTGGCTGAAGGCACACTTCATGATGCTGTCCA
GGGTCATCAGGGAGACATGTTGAAAGAGCTCCAGACGTGAGTTTTGGGCAATGTGTTCCTCCCATT
TGTTCAGCATCATCCGAACACTCTCAGACATCATGGTGATGAATATTTTCAGAATGCTGATGTTGA
AGCCAGGTTTCACAATCTGGCGGTGCTTTTTCCATTTAGAACCATCCAGGGTCACAAGTCCTCGAC
CAACCCAGGATTCAAGGATTTTGTGGCTAACAGCACTTTTGGGATCTTGTCTTTTCAGGAGAATCTT
GGCATAGTCTGGGTCATGGACACTGAAGAACATCGTAAAGGGTCCAACCCACAAGGGAACAGCAC
ATGGGTATTTTTCCATCAGCTTATGATACCCCTCAAACTCCTTTACTGGGTAAAAC

| | |
|---|---|
| Sequence 262 | cMhvSD061h01a1 |

NAATTGGAGCTCCCCGCGGTGGCGGCNCGAGGTACCTGTGGCAGCCCTTCTTCAGACACGGCTACT
TCTGCTTCCACGAGGCTGCTGACCAGAAGAGGTTTAGTGCCCTCCTGAGTGACTGCGTCAGGCATC
TCAATCATGATTACATGAAGCAGATGACATTTGAAGCCCAGGCCTTTTTAGAAGCTGTGCAATTCT
TCCGACAGGAGAAGGGTCACTATGGTTCCTGGGAAATGATCACTGGGGATGAAATCCAGATCCTG
AGTAACCTGGTGATGGAGGAGCTCCTGTCCACTCTTCAGACAGACCTGCTGCCTAAGATGAAGGG
GAAGAAGAATGGCAGAAAGAGGACGTGGCTCGGTCTCCTCGAGGAGGCCTACACCCTGGTTCAGC
ATCAAGTTTCAGAAGGATTAAGTGCCTTGAAGGAGGAATGCANAGCTCTGACAAAGGGCCTGGAA
GGAACGATCCGTTCTGACATGGATCANATTGTGAACTCAAAGAACTATTTAAT

| | |
|---|---|
| Sequence 263 | cMhvSD062c05a1 |

GCNAATTGGAGCTCCCCGCGGTGGCGGCCCGAGGTACTCTGCGTTGTTACCACAGGCGATGACAG
CTCCATGTGTGTTATTGCCCCTGAAGACCTTCCAGAGACAAAATGTGGAGGTGGAAGACAGTGAT
ACTGATGACCCTGACCCTGTGTGGATCTAGGCTAACATGTGTTTTTGTGTCTTAGTTTTCAACAAAA
AAGTTTAAAAAGTTAAAATACTAAGTTTATAAAGTTAAAAAGTTACCCCGCGTACCTGCCCG

| | |
|---|---|
| Sequence 264 | cMhvSD062d01a1 |

ATTGGAGCTCCCCGCGGTGGCGGCCGAGGTACACTTCCCGGGGAACCACCCACTGGGCTGCAATC
TCCCAGGGAGACTGCAAGGTATGGTCCAGCTTGGGTGCCAGCTCCACCCGCAAGCCAGTCATCATT
CGGTGAAAGGCCCTCTGGTCCTCCCGGTTGGCAGCTGATGTATCTAAGTTGTCAATCAGGAAAACT
TTGGTGAAGATAAAAATGACAAGGAGAATTGCTAACAGCACGACTCGCTGCTTTAGCTTCATGTTG
ACCTCTTTTCCTTCTCCTCTGACCCACTCTTGCTCATGTATTAAGGAGAGCTGGTGGTGATGGTTAG
CAAGGAGATTCCATGATTATACACATTGGTCCATTTCTTCACTGATGCACCTTCCACAGTTCCTTCC
TCCATACGCAAACACAGACTGGCAATTCACAAGTAAATGCAAGGTTTTCAATATCCAACAGTTTGT
AGTCATGAAAAAAAAGTCAAAAGTAAAACACTCCGTACCTGCCCG

| | |
|---|---|
| Sequence 265 | cMhvSD062e01a1 |

CTCCCCGCGGTGGCGGCCCGCCCGGGCAGGTACGCGGGGTAACTTTTTAACTTTATAAACTTAGTA
TTTTAACTTTTTAAACTTTTTTGTTGAAAACTAAGACACAAAAACACATGTTAGCCTAGATCCACAC
AGGGTCAGGGTCATCAGTATCACTGTCTTCCACCTCCACATTTTGTCTCTGGAAGGTCTTCAGGGG
CAATAACACACATGGAGCTGTCATCGCCTGTGGTAACAACGCAGAGTACCT

| | |
|---|---|
| Sequence 266 | cMhvSD062g11a1 |

TAGGGCGAATTGGAGCTCCCCGCGGTGGCGGCCGGGACCCGAGGGTTTGGTGCACCTCGATTTGG
AGGAAGTAGGGCAGGGCCCTTATCTGGAAAGAAGTTTGGAAACCCTGGGGAGAAATTAGTTAAAA
AGAAGTGGAATCTTGATGAGCTGCCTAAATTTGAGAAGAATTTTTATCAAGAGCACCCTGATTTGG
CTAGGCGCACAGCACAAGAGGTGGAAACATACAGAAGAAGCAAGGAAATTACAGTTAGAGGTCA
CAACTGCCCGAAGCCAGTTCTAAACAATTATTTTTACTAAAATGCATAATTATGTGATAGTTATAC
ATATACCAACCTGTTATGTGAGACAAGCTGACCTGCAAGTAGTCCAAGGCCAGTGAATCAATTACT
GCTTGTACCTGCCCG

| | |
|---|---|
| Sequence 267 | cMhvSD065d05a1 |

CCGCGGTGGCGGCCCGAGGTATAATGCCAGGAAGATGAATGTGCGTTAATGTTGCTGGAACATGG
CACTGATCCAAACATTCCAGATGAGTATGGAAATACCACTCTACACTACGCTATCTACAATGAAGA
TAAATTAATGGCCAAAGCACTGCTCTTATACGGTGCTGATATCGAATCAAAAAACAAGCATGGCCT
CACACCACTGCTACTTGGTGTACCTGCCCGGGCGGCCGCCCGGGCAGGTACGCGGGACCCAAAAA
CCACACCCCTCCTTGGGAGAATCCCCTAGATCACAGCTCCTCACCATGGACTGGACCTGGAGCATC
CTTTTCTTGGTGGCAGCAGCAACAGGTGCCCACTCCCAGGTTCAGCTGGTGCAGTCTGGAGCTGAG
GTGAAGAAACCTGGGGCCTCAGTGAAGGTCTNCTGCAAGGCTTCTGGTTACACCTTTACCAGCAAT
GGGTATCAGCTGGGTGCGACAGGCCCCTGGACAAGGGCTTGAGTGGATGGGATGGGATCANCGCT
TACAATGGGTAACACAAACTACNCACAAGAANCTNCAGGGCAGAGTCACCATGACCACAGACAC
ATNCACNANCACANNCTACATGGGAGCTNNNGGAGCCTGNAATCTTACGACC

| | |
|---|---|
| Sequence 268 | cMhvSD067d10a1 |

CCGGGCAGGTACAATGCCTTGAACATCGTCCTGCTTCCCAGTGGGTTCAGACCTCACCTCTCAGGG
AGCGACCTGGGCAAAGACAGAGAAGCTCCCAGAAGGAGAGATTGATCCATGTCTGTTTGTAGGAC
GGAGAAACCGCTTGGGTAACTTGNTCAAGATATGATCGCATGTTGCTTTCTAAGAAAGCCCTGTAT
TTTGTGATTGTCTTTTTTTTTTTTAAGATGCTTTCATTTTGCCAAAATAAAACAGATAATGTTNAAA
AAAAAAANNAAAAANTCAAAAATNAANGTGCCNGGGNCNCTCTANAACTNGNGGNTCCCCCGGG

| | |
|---|---|
| Sequence 269 | cMhvSD067g06a1 |

AATTGGAGCTCCCCGCGGTGGCGGCCGCCCGGGCAGGTACGCGGGGTAACTTTTTAACTTTATAAA
CTTAGTATTTTAACTTTTTAAACTTTTTTGTTGAAAACTAAGACACAAAAACACATGTTAGCCTAGA
TCCACACAGGGTCAGGGTCATCAGTATCACTGTCTTCCACCTCCACATTTTGTCTCTGGAAGGTCCT
CAGGGGCAATAACACACATGGAGCTGTCATCGCCTGTGGTAACAACGCAGAGTACCT

| | |
|---|---|
| Sequence 270 | cMhvSD069f05a1 |

AGGTACAAGCAGTAATTGATTCACTGGCCTTGGACTACTTGCAGGTCAGCTTGTCTCACATAACAG
GTTGGTATATGTATAACTATCACATAATTATGCATTTTAGTAAAAATAATTGTTTAGAACTGGCTTC
GGGCAGTTGTGACCTCTAACTGTAATTTCCTTGCTTCTTCTGTATGTTTCCACCTCTTGTGCTGTGCG
CCTAGCCAAATCAGGGTGCTCTTGATAAAAATTCTTCTCAAATTTAGGCAGCTCATCAAGATTCCA
CTTCTTTTTAACTAATTTCTNCCCAGGGTTTCCAAACTTCTTTCCAGATAAGGGCCCTGCCCTACTT
CCTCCAAATCGAGGGTGCACCAAACCCTCGGTCC

| | |
|---|---|
| Sequence 271 | cMhvSD069g08a1 |

CCGGGCAGGTACGCGGGTCATGGATCGAAGACTCATGCAAGATGATAATCGTGGCCTTGAGCAAG
GTATCCAGGATAACAAGATTACAGCTAATCTATTTCGAATACTATTAGAAAAAAGAAGTGCTGTTA
ATACGGAAGAAGAAAAGAAGTCGGTCAGTTATCCTTCTCTCCTTAGCCACATAACTTCTTCTCTCA
TGAATCATCCAGTCATTCCAATGGCAAATAAGTTCTCCTCGCCTACCCTTGAGCTGCAAGGTGAAT
TCTCTCCATTACAGTCATCTTTTGCCTTGTGACATTCATCTGGTTAATTTGAGAACAANACAAGTCA
AAAGGTNGGCAATGGGGCACTTCCAAATGAAGGCAGCCTTGGATCCTCCACAAGAAAAGGGTTTT
GATTTGTCGGTTTCTTCTAAGCAAAGGGNACAAGGGGTTGGTTTTTGGTTCTACTACCTCAGGGGG
AAAAGGAATATTTGGTACCCTTTGGGCCCGCNTCTTAGAAACTTAGTNGGAATCCCCCCCCG

| | |
|---|---|
| Sequence 272 | cMhvSD070c02a1 |

CCGCGGTGGCGGCCCGAGGTACCAAAAAGACTCTCAAAAACCAATACTCCCACGGGCAAGGGAAT
AGCCAAGTTTGTTGCGGTTTCCAATGAATGACATCAGCCCTGTGTAGGTCTCAATCAAAATGGGTT
CAGTTAACACCATCAGTTTCTTTCCTCTTCCAGATCCAGTTGAATTCTTGTGGGCATTCTGGATAGC
TGGAACAAGCTTAGACATGAACCCAGACAACTTGCAAATTTCAAGGAATTTCTCACTGGTGTATTT
CATAGGATGCTCAGTGAAAGTAGCATAAGGAACTTCAGTGGACCATGGGTTCCGGCGGGACAGAA
GAGACTGCTCCTCCGGACTCCCCCAGTAGATCCTAAGGCCTTCTCCTTGTCTCTTGTCCAGGGACAT
CCCAGGGAAGGTGAACTTGCCCAGGCAGATGCGATAGACAGCGCTCAGAGGAATCCGCTGCAGCT
GCACACAACTCAGC

| | |
|---|---|
| Sequence 273 | cMhvSD070c11a1 |

AGGTACTTTCTCTTTGTCTCTGCCTTCCAGGCAACAGGGATTTTGGGGTAGTAGTTAGCTCTACAAA
TTATCTTGAGCAGTTAAAAGCCTTTGCAAGCTCAAAATTTACTGCTCTGGGCTCCTTCTGGGAAAA
GCAGTGGAAACTGCCCAATGCTGTAGCTTAGCAGTTAAGGCTTTGTCTTTTCACAATGGTGGCCTG
AGTTCAGGTTCAATTTTTAGCCTAGGAAAATGAGCACTTTCTGGTTGGCATTTGGGTGACCTGTGC
CATTTTGTTGGATTCTTCCTCCCCTTTCATAAACTGTCTTAAATTTTCCTTTTCTTCTGAGCACCTGG
GAGGNTACATTTTGGAAAAGTTAAAAAGCCAGGGAACCCGCGTACCTGCCCGGGCGGGCCGCTCT
AAGAACTAGTGGGATNCCCCCGGGCTGGCAGGAANTTCGATATCAAAGCTTATCGATACCCGGCG
ANCTCGAGGGGGGGG

| | |
|---|---|
| Sequence 274 | cMhvSD070g09a1 |

ACCGCGGTGGCGGCCGCCCGGGCAGGTACGCGTTTTACAAAGAGCAGCTTGTTAAGGCCAAAGAA
CAGTATTGAAAATTACAAGAAAACAGACCAGTAAATGGTCTGGGGAAGGATCATGAAATCCTGAG
GAGGAGGATTGAAAATGGAGCTAAAGAGCTCTGGTTTTTCCTACAGAGTGAATTGAAGAAATTAA
AGAACTTANAAGGAAATGAACTCCAAAGACATGCAAGATGAATTTCTTTTGGGATTTTAGGACAT
CATGANAAGGTCTATTAATGGACCGGATCTATACTTACCTCAGTTCATGACAGGATTGGNAAGCCA
GNGTTGAATTTGGGCCGGGGAAAAAAAGGAGGCCCAAAAAGTATCCTTGAACAAGGAAACTTGG
GTTCCAGGCCGNGAGGAAATTAACCATTAATTCNTTTCAAGAAAATCCCCAAAGGGGGACCTTGG
CAATCANAAAGGCCNAAAAAAAAGCC

| | |
|---|---|
| Sequence 275 | cMhvSD071c10a1 |

CCGGGCAGGTACCCAGGGAACAAATGCTACTGGGGCTCCACACCTACCTAAGAAGCAGCTCTACC
CAGACTCCACATGGCTCTCTGTTTTGGTCTGGAGACCCCAACTGGGGTATCTCCTGAGCCCAGGGA
TTCAAAGGTTCGTGGCAGAAATATGCATCCCACGGGACTCTCACTCACTCACCATTTTCTTGTAGG
GGGATTCCCCTGGGTCTGTGCCACTCCTGGGTGAATGGTTGATCTGTCTCACTCTTCTCCGTGATCC
GAAGGTCACACTATGTCACTGATGAATCCTTATGTGTCCACCTGGATGTTCCGGTTGAAGAGCTAG
TGTCTCACCACTCTTTCTGCTATTTGTGAGAGTGGCACACACTAGCTGCTTCTAGTCAACCATCTTG
GCCCCACCTCACTCACTTTTCTCAAGTAATCAAAGACCAGAAAGGATGTCCTTTACAAGAACAGAT
CCCCCAAAATGTAAGAGTTCACTGAAAAGGNGGGAGCTCAAACCAAGAGAGGACTTATCTCGCAA
CATAAAGACAACTTGTACCTTGGGCCGGTCTAGAACTAAGGGGATCCCCGGGCTGNAAGGAATTC
NATATNAAAGCNTATTGGATCCCNCNGACCTCGANGGGGGGGCCCGGGA

| | |
|---|---|
| Sequence 276 | cMhvSD072d05a1 |

CGGGGGCCATTGAGACTGCCATGGAAGACTTGAAAGGTCACGTAGCTGAGACTTCTGGAGAGACC
ATTCAAGGCTTCTGGCTCTTGACAAAGATAGACCACTGGAACAATGAGAAGGAGAGAATTCTACT
GGTCACAGACAAGACTCTCTTGATCTGCAAATACGACTTCATCATGCTGAGTTGTGTGCAGCTGCA
GCGGATTCCTCTGAGCGCTGTCTATCGCATCTGCCTGGGCAAGTTCACCTTCCCTGGGATGTCCCTG
GACAAGAGACAAGGAGAAGGCCTTAGGATCTACTGGGGGAGTCCGGAGGAGCAGTCTCTTCTGTC
CCGCTGGAACCCATGGTCCACTGAAGTTCCTTATGCTACTTTCACTGAGCATCCTATGAAATACAC
CAGTGAGAAATTCCTTGAAATTTGCAAGTTGTCTGGGTTCATGTCTAAGCTTGGTCCAACTATTCCA
GAATGCCCACAAGAATT

| | |
|---|---|
| Sequence 277 | cMhvSD074f04a1 |

CCGCGGTGGCGGCCCGAGGTACTGAGCGCGCGAGGCTCTACAGAGTGAAGGTTTAAATCCAAGGT
CATGGCAAAACATCTGAAGTTCATCGCCAGGACTGTGATGGTACGCGGGGGACTCGGGGTCGCCT
TTGGAGCAGAGAGGAGGCAATGGCCACCATGGAGAACAAGGTGATCTGCGCCCTGGTCCTGGTGT
CCATGCTGGCCCTCGGCACCCTGGCCGAGGCCCAGACAGAGACGTGTACCTGCCCG

| | |
|---|---|
| Sequence 278 | cMhvSD075c08a1 |

CCGCGGTGGCGGCCCGAGGTACGCGGGCCTGCTGCTGCTGCAGCCCCAGCTAAGGTTGAAGCCAA
GGAAGAGTCGGAGGAGTCGGACGAGGATATGGGATTTGGTCTCTTTGACTAATCACCAAAAAGCA
ACCAACTTAGCCAGTTTTATTTGCAAAACAAGGAAATAAAGGCTTACTTCTTTAAAAAAAAAAAA
AAAAAAAAAAAAAAAAAAAAAAAGGTNCATGGTCATTTGAAAGGCAAAATCTTTATTTACTTACT
TATTATTTTATTTTTTGTAGAGATGAGGCCTCACTATATTGTTCAGGCTGATCTTGAACTCTTGGGC
TCAAGTGATCCTCCTGCCTCAACCTCCCAAGTGCTGGGGTCATAGGCATGAGCCACTGTGCCTGGC
CCAGAATCCTTTTTAAAATGATGATGAAATGCCAGAGTCTTAGATACTCAGCACTCACTATCCAGG
CCATTTTGCCGGGTAGAT

| | |
|---|---|
| Sequence 279 | cMhvSD075c10a1 |

CGAGGTACTTTNTTTTTTTTTTTTTTCTTTTTTTTGAGACGGGATCTAGCCCTGCAGCCTCTGCCTCC
CAGGCTCAAGCTATTCTCGTGTCTTGGCCTCCCGAGTAGCTGGGATTACTGGTGCATGCCACATGC
CTGGCTAATTTCTGTATTTTTAGTAGAGACAGAGTTTCACCATGTTGGCCAGGTTGGTCTCGAATTC
CTGGCCTCAGGTGATCCTCCCACCTCAGCCTCCCAAAATGCTGGGTTACAGGCCCGAGTCACAGGG
CCTGGCCTAGCCCTATCTTTACCATTAGCTCCATTTTACAAGTTGTCATGGGGGGTAGTACACAGA
AGGATCGCGCAGCTAAAAAGCAACAGGGTTGGGAGTGGAAACCAGGTTTGTGTCCTCCTCTCTTCT
TCGGCTCCCTAGTCGCCTTGGGGAGTTCCCACCAATGGGGCCCAAACCTGATCATCAAAATCAACA
GGAAACATCTTCAAAAAGGGTCCAGGGCCCGCC

| | |
|---|---|
| Sequence 280 | cMhvSD075g12a1 |

CCGCGGTGGCGGCCGCCCGGGCAGGTACGCGGGGTAACTTTTTAACTTTATAAACTTAGTATTTTA
ACTTTTTAAACTTTTTTGTTGAAAACTAAGACACAAAAACACATGTTAGCCTAGATCCACACAGGG
TCAGGGTCATCAGTATCACTGTCTTCCACCTCCACATTTTGTCTCTGGAAGGTCTTCAGGGGCAATA
ACACACATGGAGCTGTCATCGCCTGTGGTAACAACGCAGAGTACCT

| | |
|---|---|
| Sequence 281 | cMhvSD075h03a1 |

CGAATTGGAGCTCCACCCGCGGTGGCGGCCGCCCGGGCAGGTACGCGGGCTCCTACTTGGATAAC
TGTGGTAATTCTAGAGCTAATACATGCCGACGGGCGCTGACCCCCTTCGCGGGGGGGATGCAGTG
CATTTATCAGATCAAAACCAACCCGGTCAGCCCCTCTCCGGCCCCGGCCGCTCTAGAACTAT

| | |
|---|---|
| Sequence 282 | cMhvSD076e12a1 |

GGACCGAGGGTTTGGTGCACCTCGATTTGGAGGAAGTAGGGCAGGGCCCTTATCTGGAAAGAAGT
TTGGAAACCCTGGGGAGAAATTAGTTAAAAAGAAGTGGAATCTTGATGAGCTGCCTAAATTTGAG
AAGAATTTTTATCAAGAGCACCCTGATTTGGCTAGGCGCACAGCACAAGAGGTGGAAACATACAG
AAGAAGCAAGGAAATTACAGTTAGAGGTCACAACTGCCCGAAGCCAGTTCTAAACAATTATTTTT
ACTAAAATGCATAATTATGTGATAGTTATACATATACCAACCTGTTATGTGAGACAAGCTGACCTG
CAAGTAGTCCAAGGCCAGTGAATCAATTACTGCTTGTACCT

| | |
|---|---|
| Sequence 283 | cMhvSD076f12a1 |

CGCCCGGGCAGGTACAAGCAGTAATTGATTCACTGGCCTTGGACTACTTGCAGGTCAGCTTGTCTC
ACATAACAGGTTGGTATATGTATAACTATCACATAATTATGCATTTTAGTAAAAATAATTGTTTAG
AACTGGCTTCGGGCAGTTGTGACCTCTAACTGTAATTTCCTTGCTTCTTCTGTATGTTTCCACCTCTT
GTGCTGTGCGCCTAGCCAAATCAGGGTGCTCTTGATAAAAATTCTTCTCAAATTTAGGCAGCTCAT
CAAGATTCCACTTCTTTTTAACTAATTTCTCCCCAGGGTTTCCAAACTTCTTTCCAGATAAGGGCCC
TGCCCTACTTCCTCCAAATCGAGGTGCACCAAACCCTCGGTCC

| | |
|---|---|
| Sequence 284 | cMhvSD076g02a1 |

CCGCGGTGGCGGCCGAGGACGCGGGCAAGCCCAAGGTTAAAAAGGCGGGCGGAACCAAACCTAA
GAAGCCAGTTGGGGCAGCCAAGAAGCCCAAGAAGGCGGCTGGCGGCGCAACTCCGAAGAAGAGC
GCTAAGAAAACACCGAAGAAAGCGAAGAAGCCGGCCGAGGTACCAATAGCAGGAGCAGAAAGGC
CAAAATCATGAGCGCAATTGCTGCGGGTCCCAGGCCCACATAGGAGTCATGCTGTGCTTCCCTGCA
GCCGCTGCCATGCAGACACTCACAAACTGTGAGTGTAAGGACCTGCTTTTCAGGACAACTAAAAC
CCTGA

| | |
|---|---|
| Sequence 285 | cMhvSD077a05a1 |

CCGGGCAGGTACGCGGGGTAACTTTTTAACTTTATAAACTTAGTATTTTAACTTTTTAAACTTTTTT
GTTGAAAACTAAGACACAAAAACACATGTTAGCCTANATCCACACAGGGTCAGGGTCATCAGTAT
CACTGTCTTCCACCTCCACATTTTGTCTNTGGAAGGTCTTCAGGGGCAATAACACACATGGAGCTG
TCATCGCCTGTGGTAACAACGCAGAGTACCT

| | |
|---|---|
| Sequence 286 | cMhvSD077g04a1 |

CCGCGGTGGCGGCCGCCCGGGCAGGTACGCGGGGAGAGGGAGCTGGGCAGGGCACAGCAGGGCA
GGAGTGTGTTTGATGTGTCCTGGGAACCGCCCTGAGGCCGTCGTGTGGCTGGAGTGCTGCANGTGT
CAAGGAAATTGTAGGAGATGTCTCCTGAGTGTGATGGAATATAACCAGATTTCCAGAAGGAACTG
ACATGATCTGACTTAAAAAGGCCACCTACATTTACATGAAGGCCGCCTACCTCAGCATGTTTGGGA
AGGAGGACCACAAGCCGTTCGGGGACGACGAAGTGGAATTATTTCGAGCTGTGCCAGGCCTGAAG
CTCAAGATTGCTGGGAAATCTCTACCCACAGAGAAGTTTGCCATCCGGAAAGTCCCGGCGCTACTT
CTCTTNCAACCCTATCTCGCTGCAGTGCCTGCTCTGGAAATGATGTACCTCGGGCGCT

| | |
|---|---|
| Sequence 287 | cMhvSD077g04a1 |

TCAACTTTATTGATANCCGTCNAACTTNGANGGGGGGGNCCCGGTCCCAACTTTTG

| | |
|---|---|
| Sequence 288 | cMhvSD078b12a1 |

CGAGGTACCCAGGGAACAAATGCTACTGGGACTCCACACCTACCTAAGAAGCAGCTCTACCCAGA
CTCCACATGGCTCTCTGTTTTGGTCTGGAGACCCCAGCTGGGGTATCTCCTGAGCCCAGGGATTCA
AAGGTTCGTGGCAGAAATATGCATCCCACGGGACTCTCACTCACTCACCATTTTCTTGTAGGGGGA
TTCCCCTGGGTCTGTGCCACTCCTGGGTGAATGGCTGATCTGTCTCACTCTTCTCCGTGATCCGAAG
GTCACACTATGTCACTGATGAATCCTTATGTGTCCACCTGGATGTTCCNGTTGAAGAGCTAGTGTCT
CACCACTCTTTCTGCTATTTGTGAGAAGTGGCACACACTAGCTGCTTCTAGTCAACCATCTTGGCCC
CACCTNACTCCCTTTTCTCAAGTAATCAAAGACCAGAAAGGATGTCCTTTACAAAGAGCAGATCC

| | |
|---|---|
| Sequence 289 | cMhvSD079b04a1 |

CCGCGGTGGCGGCCGAGGTACCGCGGGATAGTAACTTCTTATGGAATTGATTTGCATTGAACACAA
ACTGTAAATAAAAAGAAATGGCTGAAAGAGAAAAAAAAAAAAAAAAAAAAANGTCCT

| | |
|---|---|
| Sequence 290 | cMhvSD079h02a1 |

GTGGCNGCCCGGGACCGAGGGTTCGGTGCACCTCGATTTGGAGGAAGTAGGGCAGGGCCCTTATC
TGGAAAGAAGTNTGGAAACCCTGGGGAGAAATTAGTTAAAAAGAAGTGGAATCTTGATGAGCTGC
TAAATTTGAGAAGAATTTTTATCAAGAGCACCCTGATTTGGCTAGGCGCACAGCACAAGAGGTGG
AAACATACAGAAGAAGCAAGGAAATTACAGTTAGAGGTCACAACTGCCCGAAGCCAGTTCTAAAC
AATTATTTTTACTAAAATGCATAATTATGTGATAGTTATACATATACCAACCTGTTATGTGAGACA
AGCTGACCTGCAACGTAGTNCAAGGCCAAGNGAATCAATTACTGCTTGTACCTCGGCCGCTCTAGA
ACTA

| | |
|---|---|
| Sequence 291 | cMhvSD080g12a1 |

AGGTACCATATTAAGTGGAGAGCTGCAGCAAGGTGGCCCCTACAGCCCGCAAACCAGCCTGCACA
TTACCTCTCCATACTGCAGCCCTTTATATGGAAACTTNTTACATCACTTTGCTGTGTGTGTTACACA
AGGTGGGGTTTTGCTGTACCTGCCCCGNACCGGCCNTTTCTAGAACTAGTTGGATCCCCGGNCCTG
NAGGAAT

| | |
|---|---|
| Sequence 292 | cMhvSD080g12a1 |

AGCTGTTTCCTGGTGTGAAAATTGGTATTNNGCTTCACAATTCCACACAACAATACNAANCCCGGG
AGCCATAAAAGTGTA

| | |
|---|---|
| Sequence 293 | cMhvSD082b03a1 |

CCGGGCAGGTACTTTTTTTTTTTTTTTTTTTTTTTTTTCTGAGGNCAGCGTATGTGTATTTGGTGGGG
AAAACCTAATTTCGGGGATTTCTGTGGTAGGTAATAGGANAANAAAGGGCACTGGGGGCTGTTCT
CCTTCCTTCCCTGGGCTGTATCCATGGACTCCTGTGGCTGTCAGGCAGGGGGATTGTGATGGGAGC
AGCTTTCCTGGAGTCCTTCACAGNGGCGTTTACCTTCATAGTTGATACAACCATTGCTGTCCTCATG
CCCTGCCACCAGCATCTNTACTTCTTCCTCTGTCATCTTCTCACCCAGTGTGACAAGAACATGCCGG
ATTTCAGCACCCATGACGGNGCCATTTCC

| | |
|---|---|
| Sequence 294 | cMhvSD083f02a1 |

AGGTACTCATTTAACAGGCCGTGATTTTTCTCCCGCCCCCTTTGTTGTTCCAAAAGAGTGATTTATA
TGGAAGTTTACACTAGTGCCAAATACCACTGTAGTTAAAATGAGACCAGTATCATGGCCTAATTCT
AACGTCCCAGCAGCTTTGAACAATCATGATTTATTTTCTTAAATCAAATTTCAACTCAAGCTGCTTG
ACAGAAGCTTGTCAATACATGTGCTGTATTTTTTTTGCATTTGTTGAAAAATTGCACATATAGAATT
CCAAACATTTCTCCTGGTAGGTTCAGTTACACAAATACATGTTCTATAGAACACTGAGAGGTTACT
TTTGAGTTAAGTCCACAAATCTTCCATAAGTTCAACCTAATCAGTTACCAGTTCAAGAAGATCTTG
AAGGTGGTAAACTAGCAGGAACTTCAGATTTAGGAAACCCGCGTACCTGCCCG

| | |
|---|---|
| Sequence 295 | cMhvSD085d10a1 |

AGGTACAAGCAGTAATTGATTCACTGGCCTTGGACTACTTGCAGGTCAGCTTGCCTCACATAACAG
GTTGGTATATGTATAACTATCACATAATTATGCATTTTAGTAAAAATAATTGTTTAGAACTGGCTTC
GGGCAGTTGTGACCTCTAACTGTAATTTCCTTGCTTCTTCTGTATGTTTCCACCTCTTGTGCTGTGCG
CCTAGCCAAATCAGGGTGCTCTTGATAAAAATTCTTCTCAAATTTAGGCAGCTCATCAAGATTCCA
CTTCTTTTTAACTAATTTCTCCCCAGGGTTTCCAAACTTCTTTCCAGATAAGGGCCCTGCCCTACTTC
CTCCAAATCGAGGTGCACCAAACCCTCGGTCC

| | |
|---|---|
| Sequence 296 | cMhvSD085e11a1 |

AGGTACTGTCCAACTGGATGCTGCCCTGGTGGCTGAAGGCACACTTCATGATGCTGTCCAGGGTCA
TCAGGGAGACATGTTGAAAGAGCTCCAGACGTGAGTTTTGGGCAATGTGTTCCTCCCATTTGTTCA
GCATCATCCGAACACTCTCAGACATCATGGTGATGAATATTTTCAGAATGCTGATGTTGAAGCCAG
GTTTCACAATCTGGCGGTGCTTTTTCCATTTAGAACCATCCAGGGTCACAAGTCCTCGACCAACCC
AGGATTCAAGGATTTTGTGGCTAACAGCACTTTTGGGATCTTGTCTTTTCAGGAGAATCTTGGCAT
AGTCTGGGTCATGGACACTGAAGAACATCGTAAAGGGTCCAACCCACAAGGGAACAGCACATGGG
TATTTTTCCATCAGCTTATGATACACCTCAAACTCCTTTACTGGGTAAAACTCCTTGTGGCCATAGA
ACCAGTGGGCAG

| | |
|---|---|
| Sequence 297 | cMhvSD085f07a1 |

AGGTACAAGTTGTCTTTATGCTGCGAGATAAGTCCTCTCTTGGTTTGAGCTCCCACCTTTTCAGTGA
ACTCTTACATTTTGGGGGATCTGCTCTTGTAAAGGACATCCTTTCTGGTCTTTGATTACTTGAGAAA
AGTGAGTGAGGTGGGGCCAAGATGGTTGACTAGAAGCAGCTAGTGTGTGCCACTCTCACAAATAG
CAGAAAGAGTGGTGAGACACTAGCTCTTCAACCGGAACATCCAGGTGGACACATAAGGATTCATC
AGTGACATAGTGTGACCTTCGGATCACGGAGAAGAGTGAGACAGATCAACCATTCACCCAGGAGT
GGCACAGACCCAGGGGAATCCCCCTACAAGAAAATGGTGAGTGAGTGAGAGTCCCGTGGGATGCA
TATTTCTGCCACGAACCTTTGAATCCCTGGGCTCAGGAGATACCCCAGCTGGGGTCTCCAGACCAA
AACAGAGAGCCATGTGGAGTCTGGGTAGAGCTGCTTCTTAGGTAGGTGTGGAGTCCCAGTAGCAT
TTGTTCCCTGGG

| | |
|---|---|
| Sequence 298 | cMhvSD086c05a1 |

TAGGGCGAATTGGAGCTCCCCGCGGTGGCGGCCGCCCGGGCAGGTACGCGGGGTAACTTTTTAAC
TTTATAAACTTAGTATTTTAACTTTTTAAACTTTTTTGTTGAAAACTAAGACACAAAAACACATGTT
AGCCTAGATCCACACAGGGTCAGGGTCATCAGTATCACTGTCTTCCACCTCCACATTTTGTCTCTGG
AAGGTCTTCAGGGGCAATAACACACATGGAGCTGTCATCGCCTGTGGTAACAACGCAGAGTACCT

| | |
|---|---|
| Sequence 299 | cMhvSD086h11a1 |

CCGGGCAGGTACTGTCCAACTGGATGCTGCCCTGGTGGCTGAAGGCACACTTCATGATGCTGTCCA
GGGTCATCAGGGAGACATGTTGAAAGAGCTCCAGACGTGAGTTTTGGGCAATGTGTTCCTCCCATT
TGTTCAGCATCATCCGAACACTCTCAGACATCATGGTGATGAATATTTTCAGAATGCTGATGTTGA
AGCCAGGTTTCACAATCTGGCGGTGCTTTTTCCATTTAGAACCATCCAGGGTCACAAGTCCTCGAC
CAACCCAGGATTCAAGGATTTTGTGGCTAACAGCACTTTTTGGGATCTTGTCTTTTCAGGAGAATCT
CGGCATAGTCTGGGTCATGGACACTGAAGAACATNGTAAAGGGCCAACCCACAAGGGAACAGNA
CATGGGTATTTTTTCCATCAGCTTATGATACACCTCAAACTCCTTT

| | |
|---|---|
| Sequence 300 | cMhvSD087e02a1 |

ATAGGGCGAATTGGAGCTCCCCGCGGTGGCGGCCGAGGTACAATGTTGTCTTTATGCTGCGAGATA
AGTCCTCTCTTGGTTTGAGCTCCCACCTTTTCAGTGAACTCTTACATTTTGGGGGATCTGCTCTTGT
AAAGGACATCCTTTCTGGTCTTTGATTACTTGAGAAAAGTGAGTGAGGTGGGGCCAAGATGGTTGA
CTAGAAGCAGCTAGTGTGTGCCACTCTCACAAATAGCAGAAAGAGTGGTGAGACACTAGCTCTTC
AACCGGAACATCCAGGTGGACACATAAGGATTCATCAGTGACATAGTGTGACCTTCGGATCACGG
AGAAGAGTGAGACAGATCAGCCATTCACCCAGGAGTGGCACAGACCCAGGGGAATCCCCCTACAA
GAAAATGGTGAGTGAGTGAGAGTCCCNTGGGATGCATATTTCTGCCACGAACCTTTGAATCCCTGG
GCTCAGGAGATACCCCAGCTGGGGTCTCCAGACCAAAACAGAGACCATGTGGAGTNTGGGTAGAC
CTGCTTCTTAAGTTAGGTGTGGAATCCCAGTNNGCCATTTTGTTCCCCTTGGGTACCTGGCCCCGGG
GCGGCCGTTTNTTANAACTTAGTNGGAATCCCCCCCGGCNTGCAAGGAATTTTCNAATATANAAGC
CTTTATTNGATACCCGGTCGAANCTNGAAGGGGGGGGG

| | |
|---|---|
| Sequence 301 | cMhvSD088b12a1 |

AGGTACACGTCTCTGTCTGGGCCTCGGCCAGGGTGCCGAGGGCCAGCATGGACACCAGGACCAGG
GCGCAGATCACCTTGTTCTCCATGGGGGCCATTGCCTCCTCTCTGCTCCAAAGGCGACCCCGAGTC
AGGGATCCCCGCGTACCTGCCCG

| | |
|---|---|
| Sequence 302 | cMhvSD088b12a1 |

GTTAATTGCNCGCTTGGCCGTTAATCAATGGGTCATAAGCTTGTTTTCCTGTGGTGGAAATTGTTAT
CCCGCTCACAAATTTCTCACACCAACNATAACCGAAGGCCGGGGGAGCAATAAAAGTNGTAAAAG
CCCCTGGGGGGNGCCCTTAAATGGAGGTGGAAGCTTAAACCTCAACATTTAAAATTTGNCGGTTN
GCGGCCTTCAACTTGCCCCCGCTTTNTNNCAATTCCGNGGNAAAACCCTTGTTCCGATGGCCCCAG
CCTGGCCAANTTAAAATGNNAAATNNGGCCCAAACNGCCGCCGGNNGNAGGAAGGGCCGGGTTT
TTGCCGGTAATTTGGGGCCGCCTCCTTTNCCGGCTTTTCCCTTCGGTTTCACCTGGACTTCNTNTTG
CGGCTTCGGGTCCCGTTTCCGGCTTG

| | |
|---|---|
| Sequence 303 | cMhvSD088c07a1 |

AGGTACACTCTTCCTTAAGTCCAGTGGTGCAGGAAAGCTTCAGTTTGTCAATATCACGCAAGACAG
GGACACCAAACACTACCCCTGCCCAAAGGAGCCCCTCACGGACGCCGCCATGTTGTTACCGGACC
CGAGCACCGCTCCCCGCGTACCTGCCCG

| | |
|---|---|
| Sequence 304 | cMhvSD088c12a1 |

AGGTACGCGGGGACGGTTCGTTTTTCCTTTANTCANGAAGGACGTTGGTGTTGAGGTTAGCATACG
TATCAAGGACAGTAACTACCATGGCTNCCGAAGTTTTGCCAAAACCTCGGATGCGTGGCCTTCTGG
CCANGCCGTNTGCGAAATCATANTGGCTGTAGTATCCGNTGCTATCCCTGGGGGTTGCAGCTTTGT
ATAAGTTTCGTGTCGGCTGATCAAAGAAAGAAGGCAATACGCANATTTCTACATGAAACTACGAT
GNTCATGAAAGCATTTTGAGCGAGATGANNGAAGNGCTGGGTATCTNTTCAGGAGTGTAAAGGTA
ATCTTNGGGAAATATAAAA

| | |
|---|---|
| Sequence 305 | cMhvSD088f07a1 |

AGGTACAGTGGCCCCCCGTGAAAGACAGAATTGTGGTTTTCCTGGTGTCACGCCCTCCCAGTGTGC
AAATAAGGGCTGCTGTTTCGACGACACCGTTCGTGGGGTCCCCTGGTGCTTCTATCCTAATACCAT
CGACGTCCCTCCAGAAGAGGAGTGTGAATTTTAGACACTTCTGCAGGGATCTGCCTGCATCCTGAC
GCGGTGCCGTCCCCAGCACGGTGATTAGTCCCAGAGCTCGGCTGCCACCTCCACCGGACACCTCAG
ACACGCTTCTGCAGCTGTGCCTCGGCTCACAACACAGAATTGACTGCTCTGGACTTTGAACTACCT
CAAAATTGGCCTTAAAAATTAAAAAGAAGATCGATATTAAAAAAAATTANNAAAACNNNATGAA
AAAAGNGTCCCTTGCCCNGGGCCGGCCCGTTNTTANGAACTAGTGGGATCCCCCGGGNCTGCAGG
GAAATTCCGATNTTCAAACTTNATTNGAATACCCGNCTACCTANAAGGNGGGGGGCCCCGGNTNC
CCAAGCCTTTTTT

| | |
|---|---|
| Sequence 306 | cMhvSD088g11a1 |

GGANATGGGGTTTTGCTGTGTTGCCCAGGCTGGTCTNTAACTCCTGGGCTCAAGCAATCCTCCAGC
CTCGGCCTCCCAAAGTGCTGGGATTACAGGCGTGAGCCACCGCACCCGGCCACTTGTTTCTTAATG
AGTGTCTGCAACTGCTGGGGAGGTGCGGGTCTGCCGGCCAGAGCTGCAGGTAAGTGAGGGTCAAG
CTGGTTCACANAGTGCANCAACTCAGCTNANAGTCCTGAACACACAGCCCAGCCCTTTGAAACCA
TCCCCTCCAGCACAAGGAAGACAGCATTNTGCAAACNCATCCATGGGAGCCTCAGGAAAATAAGT
TTTANACAAGTCACGTGTTCCTACCTTCCAGGCANCAAAGTCAGTGNTACAGAAAGCAAAGTANG
GGGATCGCAGGCCTCTGGCTGGAGGGAGGCCNCCAAAACTCCCTGGGATTAGNATTTCGGNTGAC
TCTAANGCCATCAGGGGTTTANCTCNACACCTAAAAGNCTACTCTGNNGGATTCNAAANCANACA
GTTACCTTGNCCGGGGCGGGCCGGGTTTAAAAANTAAGTGGNATCCCCCCGGGGCCTTGGGAGGG
AAATTTCCAATATTNAAAGCNTTTTTCANATACCCGTCAACCCTCGAGGGGGGGGGGCCCCGGGN
ACCCCCAANCTTTT

| | |
|---|---|
| Sequence 307 | cMhvSD088g12a1 |

AGGTACAAAGTGGGAGCTGGCACTGGGCAGATCTGGCTGGATAATGTTCAGTGTCGGGGCACGGA
GAGTACCCGGAGCACGGAGATCTCGCCGGCTTTACGTTCACCTCGGTGTCTGCAGCACCCTCCGCT
TCCTCTCCTAGGCGACGAGACCCAGTGGCTAGAAGTTCACCATGTCTATTCTCAAGATCCATGCCA
GGGAGATCTTTGACTCTCGCGGGAATCCCACTGTTGAGGTTGATCTCTTCACCTCAAAAGGTCTCTT
CAGAGCTGCTGTGCCCAGTGGTGCTTCAACTGGTATCTATGGGGCCCTAGAGCTCCGGGACAATGA
TAAGACTCGCTATATGGGGAAGGGTGTCTCAAAGGCTGTTGAGCACATCAATAAAACTATTGCGC
CTGCCCTGGTTAGCAAGAAACTGAACGTCACAGAACAAGAGAAGATTGACAAACTGATGATCGAG
ATGGATGGAACAGAAAATAAATNTAAGTTTGGTGCGAACCGCCATTCTGGGGGTGTCCCTTGCCG
CCTGCAAAGCTGGTGCCGTTNGAGAAGGGGGTCCCCCTGTACCCTGCCCGGGGCGGCCGCTCTAA
GAACTAGGTGGGATCCCCCGGGCCTGGCAAGGGAATTTCGATATCAAAGCCTTTNTCGGATACCC
GGGCGNCCCTCGGAGGGGGGGGGCCCGGGNACCCCCANCTTTTTGG

| | |
|---|---|
| Sequence 308 | cMhvSD090e01a1 |

AGGTACTGAGCGCGCGAGGCTCTACAGAGTGAAGGTTTAAATCCAAGGTCATGGCAAAACATCTG
AAGTTCATCGCCAGGACTGTGATGGTACGCGGGGGACTCGGGGTCGCCTTTGGAGCAGAGAGGAG
GCAATGGCCACCATGGAGAACAAGGTGATCTGCGCCCTGGTCCTGGTGTCCATGCTGGCCCTCGGC
ACCCTGGCCGAGGCCCAGACAGAGACGTGTACCTGCCCG

| | |
|---|---|
| Sequence 309 | cMhvSD090e10a1 |

AGTGGAAAAGGCTATTGCCCACTATGAACAGCAGATGGGCCAGAAGGTGCAGCTGCCCACGGAAA
CCCTCCAGGAGCTGCTGGACCTGCACAGGGACAGTGAGAGAGAGGCCATTGAAGTCTTCATGAAG
AACTCTTTCAAGGATGTGGACCAAATGTTCCAGAGGAAATTAGGGGCCCAGTTGGAAGCAAGGCG
AGATGACTTTTGTAAGCAGAATTCCAAAGCATCATCAGATTGTTGCATGGCTTTACTTCAGGATAT
ATTTGGCCCTTTAGAAGAGGATGTCAAGCAGGGAACATTTTCTAAACCAGGAGGTTACCGTCTCTT
TACTCAGAAGCTGCAGGAGCTGAAGAATAAGTACCTGCCCGGGCGGCCGAGGTACCGAGCATGAA
CATCTGCAGCCTCTTGCAGAATCACCCCAGAAGGGGACTGAATCATGGTCCTCTTGATAGGTATGT
TCAGCAGAGTTTCCAGTCCTGAGGTGTATGAGGCCAGCTGGAGCTCATAATCCTTAATTGAATTGG
CGCAAAGTTCAGCAATTTTTTGTCCTGCCCG

| | |
|---|---|
| Sequence 310 | cMhvSD090f09a1 |

AGTGGAAAAGGCTATTGCCCACTATGAACAGCAGATGGGCCAGAAGGTGCAGCTGCCCACGGAAA
CCCTCCAGGAGCTGCTGGACCTGCACAGGGACAGTGAGAGAGAGGCCATTGAAGTCTTCATGAAG
AACTCTTTCAAGGATGTGGACCAAATGTTCCAGAGGAAATTAGGGGCCCAGTTGGAAGCAAGGCG
AGATGACTTTTGTAAGCAGAATTCCAAAGCATCATCAGATTGTTGCATGGCTTTACTTCAGGATAT
ATTTGGCCCTTTAGAAGAGGATGTCAAGCAGGGAACATTTTCTAAACCAGGAGGTTACCGTCTCTT
TACTCAGAAGCTGCAGGAGCTGAAGAATAAGTACCTGCCCGGGCGGCCGAGGTACCGAGCATGAA
CATCTGCAGCCTCTTGCAGAATCACCCCAGAAGGGGACTGAATCATGGTCCTCTTGATAGGTATGT
TCAAGCAGAGTTTCCAGTCCTGAGGTGTATGAGGCCAGCTGGAGCTCATAATCCTTAATTGAATTG
GCGCAAAGTTCANCAATTTTTTGTACCTGCCCGGGCGGCCGCTTCTANAACTAGTGGATCCCCCCG
GCTTGCAGGGAATTCGANATNAAGCTTATNGATACCGTNNACTTTAGGGGGG

| | |
|---|---|
| Sequence 311 | cMhvSD090f12a1 |

AGGTACCAGCAGACCCCAGGCCAGTCTCCACGCACACTCATTTTCAGCACAAACACTCGCTCTTCT
GGGGTCCCTGATCGCTTCTCTGGCTCCATCCTTGGGAACAAAGCTGCCCTCACCATCACGGGGGCC
CGGGCAGATGATGAATCTGAGTATTACTGTGCGCTGTATATGGGTAGTGGCATTTGGGTGTTCGGC
GGAGGGACCAAGCTGACCGTCCTAGGTCAGCCCAAGGCTGCCCCCTCGGTCACTCTGTTCCCGCCC
TCCTCTGAGGAGCTTCAAGCCAACAAGGCCACACTGGTGTGTCTCATAAGTGACTTCTACCCGGGA
GCCGTGACAAGTGGCCTGGAAGGCAGATAGCAGCCCCGTCAAGGCGGGAGTGGAGACCACCACA
CCCTCCAAACAAAAGCAACAACAAGTACCTGCCCGGGCGGCCGCTCGACCCGGGCAGGTACGCGG
GGGGGCAAAAAAATCAAGGTATTTGGTCCCGGAACAAAGCTTATCATTACAGATAAACAACTTGA
TGCAAGATGTTTCCCCCAACCCACTATTTTTCTTTCCTTTCAATTGCTGAAAACAAAAGCTCCANGA
AGGCTGGGAACATACCTTTTGTCTTTCTTTGGAGAAAATTTTTTCCCCTTGATGTTTATTTAAGNAT
ACATTTGGGCAAAGAAAAAGGAAAGAGCCAACCACGGATTCTTGGGGATCCCAAGG

| | |
|---|---|
| Sequence 312 | cMhvSD091a07a1 |

GCATTGAATCAACCTCAGCCACCATCTGCTTTTAACAGCCAGGAGAAACCAGTAGTAGCCAGCAG
ATCGCGCCTACCAACCAGTTTCACCAACTAGCAGGTAACTCCGGGTTTCCAATCTGTCCATCCAGG
GAGGAAGAAATGCAGGAAATGAAAGATGCATGCACGATGGTATACTCCTCAGCCATCAAACTTCT
GGACAGCAGGTCACTTCCAGCAAGGTGGAGAAAGCCAATCACACATCAAGAGATGAAGACACTG
CAGTACCT

| | |
|---|---|
| Sequence 313 | cMhvSD093b03a1 |

CCGGGCAGGTACGCGGGGTAACTTTTTAACTTTATAAACTTAGTATTTTAACTTTTTAAACTTTTTT
GTTGAAAACTAAGACACAAAAACACATGTTAGCCTAGATCCACACAGGGTCAGGGTCATCAGTAT
CACTGTCTTCCACCTCCACATTTTGTCTCTGGAAGGTCTTCAGGGGCAATAACACACATGGAGCTG
TCATCGCCTGTGGTAACAACGCAGAGTACCT

| | |
|---|---|
| Sequence 314 | cMhvSD093d07a1 |

AGGTACGCGGGGACACCAAACAACTCATTACACAAAGAGGTAAGGTCCCAGACCACGCCAAAGCT
TCCTGAGACCTCTCCTCATCTGTGCATGGACGGATGACCAACTCTGGGGCCCAGGCTGTTGCTTCC
CAGTATAATGATGAATCCGCCATAGTCTGGTGAGTGTAGAGGCTGACTCTGGAGCCCAAGCTGTAC
CTGCCCG

| | |
|---|---|
| Sequence 315 | cMhvSD094b01a1 |

CCGGGCAGGTACCACTCTTTACCAAACTGCTAAAGGAATCGAAACCTTCTCCAGAGGTCAAATGGT
CAGGAATTCGAGTAAGGCACACTCTCAAATCCTTAGTAAGGCCAAATATCTTTTTAAATTCAGCAT
CACTCTTCAGATGTAATGCCTTATTACTTCTTCCTTGAGAATCTTTCTTGTCATTTCTTCCTTGGGCA
CCTTTATCTGATGTTGATGCCATCTCATTATGGATCTTTGGTTCTTGGTCTCTAAAAACACACTGTT
GTGAAGTAACAGTTGTTGCATCAACAGAGGAACTTATTTTCTCTATGCTCTGGAGGACACTTNCTT
TTCTAGCATAAATGACGGCTGTTACTTTTCTGGGGGCATTGTGTNCTGTACCT

| | |
|---|---|
| Sequence 316 | cMhvSD094d05a1 |

CCGGGCAGGTACCCAGGGAACAAATGCTACTGGGACTCCACACCTACCTAAGAAGCAGCTCTACC
CAGACTCCACATGGCTCTCTGTTTTGGTCTGGAGACCCCAGCTGGGGTATCTCCTGAGCCCAGGGA
TTCAAAGGTTCGTGGCAGAAATATGCATCCCACGGGACTCTCACTCACTCACCATTTTCTTGTAGG
GGGATTCCCCTGGGTCTGTGCCACTCCTGGGTGAATGGCTGATCTGTCTCACTCTTCTCCGTAATCC
AAAGGTCACACTATGTCACTGATGAATCCTTATGTGTCCACCTGGATGTTCCGGTTGAAGAGCTAG
TGTCTCACCACTCTTTCTGCTATTTGTGAGAGTGGCACACACTAAGCTGCTTNTAGTCAACCATCTT
GGCCCCACCTCACTCCTTTTNTTCAAGTAATCAAAGACCAGAAAGGATGTCCTTTTACAAAGGAGC
AGATCCCCCCAAAATGTTAAGAANTTCACTTGAAAAAGGTGGGGAAGCTCAAACCAAAGAGAGG
GACTTTATCTTCGCAAGCCATTAAAGACAACCTTTGTACCTTCGGGCCGCTCTAAGAACTANGTGG
GATNCCCCCGGGGCCTGCAGGGAATTCGATTATCAAANCTTTATCGGAATACCCGGNCGAACCTTC
NAAGGGGGG

| | |
|---|---|
| Sequence 317 | cMhvSD094e07a1 |

CCGGGCAGGTACCCATGGGAGATGGACTGGCTTGTTCTTTGGGTCAACTGCAGCTTATTGGAGGTG
TTGATATGGCACTTAGGGTCTTTGCTCCCTTGATATATCTTCTGAGGGTAGCAAGGGCAATTCTACT
GCAGAGGCANTGGCAGAAAGGATTTCATTTGCTCCTGGAAGCTCTGTCCAAAAAACTGCTGAGTT
GCTACTGGCTTGATAGCTCCGGTGGTGGGCTGGCTAGAGACCCAGGCCAGGAGGACCTGCCCATC
AAGTAGAGTCCGGTCAATTTTCTGTAGGGCTGCTGTGGTATGCTGGGGGGTCCCTCCANTCCCCTA
ATTGCCTCATATTTTTTCCCAGGGGAAGAATGATAGCNCTGCCCCCTTTTCTNTTGGGAAGCTNTTG
TNCCTTCNGGNCCGNCCCGGGCCAGGGTTACTTTTTTTTTTANTTTGACNAGGAGGGAACAATGCC
CTTTTAAAAAAATATTTTTAATTGGGGTNGAAAACTTTTCTTAATTCTCAAGGAAAACCTTTTGGGN
TNCTTTTAATATAAATTTAATTNATGCTCTTTAAAAATTTCTGTTTGGATNNAAAAGCANTTGGTAT
TATTATTAAAATACCCTGTTAAAAGAAAAAATANTANTTTTTAAAAAT

| | |
|---|---|
| Sequence 318 | cMhvSD095c03a2 |

CCGGGCAGGTACGCGGGGTAACTTTTTAACTTTATAAACTTAGTATTTTAACTTTTTAAACTTTTTT
GTTGAAAACTAAGACACAAAAACACATGTTAGCCTAGATCCACACAGGGTCAGGGTCATCAGTAT
CACTGTCTTCCACCTCCACATTTTGTCTCTGGAAGGTCTTCAGGGGCAATAACACACATGGAGCTG
TCATCGCCTGTGGTAACAACGCAGAGTACCT

| | |
|---|---|
| Sequence 319 | cMhvSD095c05a2 |

CCGCGGTGGCGGCCGAGGTACAAGCCTTGAACATCGTCCTGCTTCCCAGTGGGTTCAGACCTCACC
TCTCAGGGAGCGACCTGGGCAAAGACAGAGAAGCTCCCAGAAGGAGAGATTGATCCATGTCTGTT
TGTAGGACGGAGAAACCGCTTGGGTAACTTGTTCAAGATATGATGCATGTTGCTTTCTAAGAAAGC
CCTGTATTTTGTGATTGCCTTTTTTTTTTTTAAGATGCTTTCATTTTGCCAAAATAAAACAGATAATG
TGGATGGTTTAAGGGTTATAGTATTATAGTTTAAATAA

| | |
|---|---|
| Sequence 320 | cMhvSD095c09a2 |

AGGTACGCGGGTAAACTTGGCATTTCCAAAGGAGTAATGCCCCCATCTTGTATGTAACTCCAACTC
AAAGGAACAAAAGAGAGGGCCAATTTTATATGAAGTTTTATTCTCAAAATATAAAAAAAAAAACA
AAAACCCCACACACCAAGGGACTAAGATGATGTTATTTCACAGCACTTGCTTGCCTCAGTCTTTAC
GAAGAACACAATTCCAAACTAATGGACAAGTTCCTCCCTGTGCTCTAGGTCATTCAAAGGAGGCA
AGCTCCTTTTGTCAAATCAGGAGCTCCATCAGCTGATCAGGAGCCCAGATNCCAGGGTGGATTTTT
CTCAGTGGGATCTAGTATTGCTAGAAGAGCCTTCCTTACATGGCAAGAAACAGGCACATGGGCCT
NTTTCCTTTAGAATGCATCTTGTCTNACATGCTTTGGGGACTGCTTGNGCCANGAACCACCTTGGTG
TTGGCCTGGCNAAGGCANCNTNTTACATGGGCCCCCCCAAAAACNTGGGNCNTGGCNATTTTTTTT
TCCCGGCTTTTTTNNCANGCCCCCCTTNANGGNANNAAGCNCCCATTGCCACTTGGTGGGGCTTGG
GGTANTTTTNCCGGGAATTCNNNTTNNTTTCTCCCCGCAAAANAAAAANANTCNNNGGAAANTNC
GGGTTTTTTTTTNAGGGGGAAAA

| | |
|---|---|
| Sequence 321 | cMhvSD095d05a2 |

CCGGGCAGGTACGCGGGGTAACTTTTTAACTTTATAAACTTAGTATTTTAACTTTTTAAACTTTTTT
GTTGAAAACTAAGACACAAAAACACATGTTAGCCTAGATCCACACAGGGTCAGGGTCATCAGTAT
CACTGTCTTCCACCTCCACATTTTGTCTCTGGAAGGTCTTCAGGGGCAATAACACACATGGAGCTG
TCATCGCCTGTGGTAACAACGCAGAGTACCT

| | |
|---|---|
| Sequence 322 | cMhvSD095f12a2 |

CCCATAATGGCTATTTATTGGATCAGCAATTTATAAGTCCCACATTCTCATGCCACATAGCTNTACA
CAGNTGCAAAAATATACCATAGNTTGCAGGGGATCATTGGTTTGATAAAAGATATTGAGTCGCTC
ATTTTGTGAAAGNGACCTTTGATATAAGAGGAGCATNACGCGGGGAAAGCTCACATGTCCCGTGG
NTCACACACCAGAAGGTATTTGCGNNTTGTCATTGCTGTCTGGNAGGCCATGGCAATGGCTTTTTT

| | |
|---|---|
| Sequence 323 | cMhvSD095g02a2 |

CCACACACAGGACACACACAAATGCATGCCCCATGATCGCACTCAGGAAAAAACCCACGGNCTNC
CATATGGCTGNNAACAAACTNTAGTTTNTACCANTCCTGATGGTGAGCACGANTATGTNGAAAGA
AGCAGGCACAGCANAAGAGTTCGTTGTGCTCGNGGTCATGTAAATGTTGTATCTGGTGAAGGTGG
GTCATTGTTACATGACTGAATTGNNTCCCTTCAAAATTCATAGGCTGAAGCCCTAGTNACCGTTTTT
GNANACAGGGTNTTTTAGGAGGTTATTNAGGCTAAATGAANTCTTAAGGGGGGGCCC

| | |
|---|---|
| Sequence 324 | cMhvSD095h02a2 |

CCGGGCAGGTACCCAGGGAACAAATGCTACTGGGACTCCACACCTACCTAAGAAGCAGCTCTACC
CAGACTCCACATGGCTCTCTGTTTTGGTCTGGAGACCCCAGCTGGGGTATCTCCTGAGCCCAGGGA
TTCAAAGGTTCGTGGCAGAAATATGCATCCCACGGGACTCTCACTCACTCACCATTTTCTTGTAGG
GGGATTCCCCTGGGTCTGTGCCACTCCTGGGTGAATGGCTGATCTGTCTCACTCTTCTCCGTGATCC
GAAGGTCACACTATGTCACTGATGAATCCTTATGTGTCCACCTGGATGTTCCGGTTGAAGAGCTAA
GTGTCTCACCACTTCTTTCTGCTATTTGTGAGAGNGGGCACACACTAGCTTGCTTCTTAGTCAACCA
TCTTGGGCCCCACCTCACCTTAANTTTTNTTCAAGTNATTCAAAAGACCCAAAAAANGGNTGTCCC
TTTTACAAANAAGCCAGAATCCCCCCAAAAAATGTAAAGAAGTTCACTGGAAAAAANGGTGGGGA
AGCCTTCAAACCCAAGGAGAANGGACCTTTNTTNTTTNCCAGCATTAAAANGACCNACTTTGNGN
CCTCCGGGGCCGNCTTCTTANAAACTTANGTGGGAATCCCCCCCGGGCCTTGGAAGGGNAATTTCN
GANNNTTCCAAGCCTTTANTCGAATNCCCGGCCGNACCCNTGAGGGGGGGGGGC

| | |
|---|---|
| Sequence 325 | cMhvSD003a01 |

AGGTACTGANANAAAAATNTGCTCTGTGGGNNNAGCNTATCCAGTCCACAGCCCCTNTCTTGGTN
ATTNATAAAGACAANGATCTGCNCTNAGGGATNCCTNAGCNATTCTCCAATCTCCATCTCACGGTA
CNACAATCACCTTGACCATCAGNGG

| | |
|---|---|
| Sequence 326 | cMhvSD004c08 |

CCGGGCAGGTACCACTTTTATCACATGCAGCTGCCTTAACCAACAGGTTTTCTAAGATACTATCCC
CCTTACCTGTTTCTGCCTCTTTCAATGGTGTTTTTCCATTTTTACAGACTTCTGAAAATTTTAGCTTT
CATTGAAATAAGCTTCCCCATTCCTTCATGTTAATATATCTAGCAATATTGAATAGAAATTATAAAT
GGAAATAAAAATGCTTGCTTTTATAAAATCTCCAGTCTCGCAGCACCCCCAATATAATACAAACAG
ACTTAAGTTGAAATTTGGTTTGTTAATGCCCACCTTGTGTGGTCAAAACACAGTTTTGAAGGAATG
ACCACCTTCAATGTTCTTTACAGCTTCTTTAGTGTTACTTAAAAAAAAAAAATCAATCTGATGGAT
GATTGATGGTANGTTTGTTCATGGAAGATCTTCATCTTATGGGAATTATCTAGTTTTTCTAATCATA
TACTACCAACAAAAATAAACACAAGCGTGTTCCCTTTAATCATATTATCCTCCACCATTACTTCCA
AAAG

| | |
|---|---|
| Sequence 327 | cMhvSD007c03 |

CCGCGGTGGCGGCCGNCNGGCCANGTNCNACTAANATCTTCANTNNACTANCANGATAAACAGGN
CNATNAATAACTGAGGNNAAGCCCNANTNGCAAGGNCACACANGAAAGAATCAGACCACGAAAT
GAGCTNCNNNTGNCACCTGCANNGGGNGCACNATGAGGNTTTNTGAACTCNATGAGCTACCGAGC
CACGGNTTCTCGATGTAGCACTCTTATTAGTGTCGCCCTGCGGCGCCGGTCTACAAGCGACGNGGT
CTGTTTTATCCATTATACCACAGGGGAAGGGACCGNTTNAGTGCTNCGAAGGTTATACNCAGTACT
GTAATCCACAGGCACAAGACCACCTACTCATTGNGCATNCNCCAAGCTCTCNTGGNCCAGAACAC
CTTCTNAGNATGCTATGNGGGCATTNCTNGCGCNCAAGCTCGGTANGGGAAATAAANATNTATTA
TTNGGCCTTTANTCCAATTACCCTGGCCTTAATCCCTCTGNGGGGGGGG

| | |
|---|---|
| Sequence 328 | cMhvSD009a02 |

CCGCGGTGGCGGCCCGAGGTACAAAGTGATCAAACCTGTCTATTAATTAAGCAAATGAGTGGTGA
ATCACTGAGACGGCTGGATGGCTGAGCTGAGGGATGTGATGTGTGCCCAACGTCCTGCAGGGTGC
TGGTGAATAACATGAGAAAGAACTTAAAATGGCTTGATGATCTCACCATTTAGTGACCTTGGTTGT
CACACTGCTTTCCAAGAGCCCTTTAAAGGTAGGAATGAGAGCTGTTTCCAGTATGCATTCCAATAG
GAATGCAGCTTTGCTAAAGTTAGAGACATAAACTAAAACCCTGTGAAGTCCTATAGAGCCCTTGG
ACTTATTTCCTAGCAAGCATTTATCATCCCCACCATCCTCTACTTCAGGACACCCGCGTACCTGCCC
GGGCGGCCGCTCTAGAACTA

| | |
|---|---|
| Sequence 329 | cMhvSD014h08 |

TCCTATAGGGCGAATTGGAGCTCCCCGCGGTGGCGGCCGCCCGGGCAGGTACTAATCATCCTGTCC
CAACAACCATCCAATCCACACCCCATCTACTCCCACAACTTTTGTAAGCAAATAACAGCCCAACGT
TTTATCCACAAATGTTTCCGTATGTATTTCTAAAAGATAAGGCCTTTTTCTTAAACTACCCACATCG
TCACACTCGAAAAAAAGTAGTGACTGCTTGATATTAGATATTCAATTACGTTAAAATTTCCAATTA
TCTCACAAATGCCGCACATTTAAAAATTTTTTTTATTCAATCACAAATCATGTCCATATTATAGAAC
ATTGGGATTTGAACTCAGGCCTGCTTCCAAAACTTGTATACTGCCAACTTTGTCATGCTATAAGAA
TGCATGCATGGAGAGAGACAAGACAGAAATAAAGCCTTTCTTGTCCTTTAAATGTCCTGCTCTGCA
GTAGGAATTGTAAGGTAGGTAAGTAAATAGATGTNCTGAANGCTACCTCTGACCTTTTAAAATCTT
TGACATAGATAGGTTGAGAAGGCAGCAATATACCTTTAACCAAACTAACTACCAAAGGAAATTTG
GAAANGGGCACCAGA

| | |
|---|---|
| Sequence 330 | cMhvSD016c06 |

AGGTACTGCCTGCCTCTAGTGTCGCGTCCCTCCAGTATCCGATGGGAGCGCCGTCCGCAGGGAATG
TGTCTCTCTGATCATGGTGTCTCGTGTCCAACTCTGGGGGAAGACCGAGACAAATCGAGTCACTGG
TGNTGGGAAAAGGCTTATTTCCGCTTNCGCTTGNCCANTTTCANGAATTTGATTCTGAGAGCNGGG
CTNCNGTTNCANGCNNGGNTTGTACCTNCCCG

| | |
|---|---|
| Sequence 331 | cMhvSD026a03 |

CGGCGGCCGCCCGGGCAGGTTNACATGGTNCGGCTTNAATACTCCCAGTTNNTGANNCNGCNCAC
AAGCCCTGNGANCNNGGCNANNTNCCNATATNCNGAGACTGACAGGGCTTANTAAGAACCNNCC
CATCNGACATNNGANGGAGANNAAGGNGCNGNACNAGNCCGCNGAAANAANCATACCCTGAGAA
TNCCNNNCNACCAANAGGNATTTGAGCNGCCTGTTTGATGTAAGAAAAGGA

| | |
|---|---|
| Sequence 332 | cMhvSD027e05 |

TATCGGCGAATTGTAGCTCCCCGCGGTGGCGGCCGNCCNGCCATGTANGCTNGATANCCTNCAAC
CCAGAAAGATNTANTTNCGCGAGCACNNCTNNNGCCANNTAGCNAGACATTTTNACCCGAATGCC
GTNANNTTNAGGAATNCCCTNNTNCNGANTNTTTTGCTTCNTNCCACCCCTANGGGGAAANACTGC
TTTGTGCTTTGG

| | |
|---|---|
| Sequence 333 | cMhvSD035a01 |

GCNCCACTGCACTCCAGCCTGNGTGACNGATCAAGACTCTGTCTTAAAAAAAGAAANAAAATAAN
GTGAATATCAGTATTGCTTGAAAATTCCTAGAATATTTGGATAAAACTTTAAATGAANACATGAAT
AACTGACTTTGGGAACTGTAATTGTACCAAATTTTGTTTTTCCAAAAACAANAAAGTAACCTTGGT
TCCCAATACAACCAGAATTTTGATATTCCTTGNACTGCATGCCT

| | |
|---|---|
| Sequence 334 | cMhvSD036g08 |

CTGTCTCACTGACTGNGGATGAGGATGGGAGGTCAGCTACTCACTGGTTTTCACTGACATTANGGG
TATANGGAACCANAGTGCTGACTAGCCCTGACTNGCTCTACTGTATTCAATCTCATTGNTGNCAGG
TNTATATGGGGNGTGAGTNTATCATAACACNNACTANCACTACCTNACACTACCA

| | |
|---|---|
| Sequence 335 | cMhvSD037f08 |

AGGTACCCGGGNACCTGATNCATTTCTACCNNNCTNTAGNAGAANCACATCTTANTGGTGNNATN
CGTCTGTTCTTNCTCACGNATGCCGCCCCNACNAGGCNTGACAGACCATACTAGGCCATANGCANC
GACTTGT

| | |
|---|---|
| Sequence 336 | cMhvSD045f05 |

TGGAGCTCCCCGCGGTGGCGGCCGCCCGGGCAGGTACTTNCTTTTTTTTTTTTTTTTTTTTTAAAAN
NCCNNNNAAANNGGGGATNCCCCGGGGNANANCCNNNGNCNNANNNGAGNAANAAGGNGGTAA
NNAAAAAAGGCTCCCTGAATNAANNNNNTTTNGCCCTATNANGGNGGTTTTTTATTGCCCCNNGG
CNNGAATATNCCNCNCNNAAANGGCCCCCCGCTTTTTTTTTTTTTTT

| | |
|---|---|
| Sequence 337 | cMhvSD045g01 |

ACGTACCAGGATNTACANTNNAACCATCTTTTCCGGNNAGNCCNCAAGNANNAGCTGNGCCCCTA
NGANNANAAAGACCNACGGANCCNGGGGCANNTTGATNACNATGGNNACCANCCCNNGNGTACN
TGNCNGNNCNGACGTTTTAAAACTANAGGNTTCNNCNNTNTGAAGGAATTGGATNTCANNNTTNT
TGANANCGTTNACTTCTAAGGGNGGNNCNNNNCCNACTTNTNNTTCCCTTTAGNAATGNTTAANN
GCANNCTTNNNNNAATAATNNTCATNCTTNTNAACTGGGTCANGANATTTTGCCGTATGAACATCA
CAGAGTGTACCT

| | |
|---|---|
| Sequence 338 | cMhvSD046e03 |

AATTGGAGCTCCCCGCGGTGGCGGCCGAGGTACAGTGGCCCCCCGTGAAAGACAGAATTGTGGTT
TTCCTGGTGTCACGCCCTCCCANTGTGCAAATAAGGGCTGCTGTTTCGACNACACCGTTCGTGGGG
TCCCCTGGTGCTTCTATCCTAATACCATCGACGTCCCTCCAGAANAGGAGTGTGAATTTTANACAC
TTCTGCAGGGATCTGCCTGCATCCTGACGCGGTGCCGTCCCCAGCACGATGATTAGTCCCAGAGCT
CGGCTGCCACCTCCACCGGACACCTCAGACACGCTTCTGCAACTGTGCCTNGGNTACAACACANAT
TGACTGNTCTGACTNTGACTACTNAAAATTGGCCTAAAAATTAAAAGAGATCNATCTAAAAAAAA
AAAAAAAAAAAAAAANTTCCTNCCCCGGNCGNCCNNGNAAAAANCCGGGTTTTTTTATTCCCCTN
AANNGGAAATGAAAAAATTTNGCCTTTNNCNTCCNAATTTGGNCNNTTTATTTNCCNNNNGAACTT
TNTTTAAANNGNNACTTTTTTCCNNTTTNAAAAAAANGGGTTGGGGGNNCCCCCCGGCCATTTTNN
CNGCCANTTCCCNTTTNGAGAAAANAAAAAATTTTTTTTTTTCCCCNNNGAAACAAANCCCTTAAA
AAAAAT

| | |
|---|---|
| Sequence 339 | cMhvSD048b05 |

TGGAGCTCCCCGCGGTGGCGGCCGCCCGGGCAGGTACTTTCTTTTTTTTTTTTTTTTTTTTTTTAANA
NCCGCAGNTCNNTNTTATNCCTNCNNAAAAAAAANNNNTNTNCCTNTNGCCATTNTTTAAAAAAA
CNNTNACNTNTTNTTNNAAAAANANNTTTNNTTTAAAAAANNTNGNNCNAAATNNNNTTTNNGGG
GNAAAAAAAAAAAANNNTTTTTGNNNNCTNNTTTTTTAAAAAAAANNTTTTTTTTTNTNACCCAAA
NGNNGGCGTNTTTANTNTNNCCCCCNTTCNNAATGNNATTTTNAAAAANAGNTATCCCCCGNNNC
NGNNGANNNTNANNNAAAATTTTTNNANCCCCCCCCCCN

| | |
|---|---|
| Sequence 340 | cMhvSD048d04 |

ATCTNCATTAGGGCTATCATTCCTATCCANATTCCCACAGGCTCACAGNTAAGCTACTNCAACAGC
TGTTGCTGACTAAATATNCTCATGTNTCTAAATAATTATNTAAATANGGAACAGNGGATTNATACC
TGATNCCTCTACATTAAAAAATATTTCTTTCATTATTACATCAANAGTAAAATATATAAAACATTCT
GCCTCAATTTCAAGGTCTTNATTAAGTTGGTACCT

| | |
|---|---|
| Sequence 341 | cMhvSD048e12 |

AGGTACTTTATTTTTTTTTTTTTTTTTTTTCNNTTTTAAAAAAAAAAGGGGGNNNTTTTTTTAAAAAA
AANNGGGNNCNNTTNCCAAAAAANNTTNNTGNNTNCCCCCCCCNTTTTCNAANGGGNATTTTNNN
NNNNGGGNNNCCCCCANGNTTTTTTTNTTNGNATTNNNAANNTNGTNTTCCCCCATTNNTTTTTTTT
TTTANNNCCCCCTTTTNAAAAAANNNNNNNGNGAANCCNTTTTNNGCCCNNNNNAAAAATTTNAA
NNTTTTTAANCCCCTTAAAAAANNCCCCNTTTTTNNGGNGNCCNCCTCCCNNTTNNATTTTNAANA
TTTTTTTTTTNAAGGGGGGNGGATTTTTTTNNANNNNNNTTNNNCCCCNANNGNCCTTAAANNNNN
NTNNNNTNCCCCCCCCNNTCCCNGGGGGNTTTTTTTCAAAAAANTNTTTTTTTTTNANCCNTTTTTG
GGNCCCCGCCCCCCCNNNTNANCCNTTTTTTTTTTTTTTTAAAANTGGNCAAAAANTNACACTNNN
TTTTTTTTNCCAANANANCNATTTGGGGNAACCNCCCCGGGGGCNTAAAGCCCCGGGGGGGNTTT
NNGGCCCCCCNCCCNGGGTTTTTTTTTNGGGGGGCCCNNNTCTNTTTNAAAAANCCAAAAAAANTT
TTTT

| | |
|---|---|
| Sequence 342 | cMhvSD049c01 |

ACGAGGTACCGCGGGTCAGGAAGGTGAGGGCGAGACCCCTACCCCCACAGAGAGCAGCAGCCAT
GGGGAAGGGCAAAACCCCAAAACNCTANTGGAAGAAAAGCCCTATCTGTGCCCCGAGTGTGGAG
CCNGCTTCACAGAAGTTCGCAAGNCCCTACTNTTTCNNATAGGGAAGCNTTGNCCACCCCCAGGGT
TGNTCTNCCCTNGNGNAAAAATGGGNGTTCTTGGTAGAAACTCAAGGAGGGCNCCTTCTGCTCTTT
NCTCTCCNGGAAGTAGNNGAAAACCAACTTGGGAATTTTTTTTNTGNCCCCNNCAAANAANAANA
AATNNTNTCNNCNGGGGGGNGNANAANGGGGGGANGGGANTTATANCCCCCCTTATTCNANANA
ATTGGGTTANGGCTNGGGNGANGNTTGNGGANGTGGAAAGAATANAAGTANACCCCNCTNGNGN
GAAAAAAAAAATANTTAGGTTNGTCNTTTTTTTACNNTACNANGNTTGTAATTGTAAGGTAAAAA
NCCCCCTTATTTAAAGAAAATTTGGTCTTGGGCTGGGNGGNANAGNCTACCTTTAATTAAANGGGC
CAGTTTNTTAGGAAAAAAAACCTGTGTTGGGTGTTTTAAGAAAAA

| | |
|---|---|
| Sequence 343 | cMhvSD056d03 |

AGGTACTTTTTTTTTTTTTTTTTTTTTTTTNGGAAGGTTCTCAGGTCTTTATTTGCTCTCTCAAATTCC
AGGAATTGACTTATTTAATTAATCCATCAACCTCTCATAGCAAATATTTGAGAAAACAAATTGATA
TTCAGATTCTTATTTTCAGCAGGGAAGTAAGAAGTTGCAGCTCAGTGCACATAAAGTTTGAGACAG
AGATGGAGACATCCAGCCCCACCTNTCTGGAACAAGAAAGATGACTGGGGAGGAAACACAGGTC
ANCATGGGAACAGGGGTCACAGTGGACACAAGGTTGGGCTGTCTCCCCACCTCCTCACATTAGGC
TTACAGGGACGCAGACACATTCAGGTGCCTTTGCANAAAGAGATGCCAGANGCTCTTGAAAGTCA
CAAAGGGGAGGCGTGAAGAAATCCTGCATCTCAGTNCCTTCACAAAGACAACTTGGTTTANGCTTT
TNAAGCTTGTGAGGAGACACACCCNGCGTTACCCTGCCCCGGGCCGGCCGCTTTTAAAAACTAGTG
GGNTCCCCCCGGGCTGCAAGGAATTTCGATNTNAAACTTTATTGATTCCGGNCNACCNTTGANGGG
GGGGGCCCGGGTACCCCAACTTTTTGT

| | |
|---|---|
| Sequence 344 | cMhvSD058h02 |

AATTGGAGCTCCCCGCGGTGGGCGGCCCGAGGTACTTTTTTTTTTTTTTTTTTTTTTNNCCCNNCNTT
TCCCGGNNAAAAANNNTTGANTTCNNNNTANNNAAANANNACGTTNTTCANNGGGGGAAAAAAA
GGCCNCANNNGGGNGGGNGNNNACNATGNNACCCNNGGGNNTTTNNGGAAGANGGGNGCTCAA
NNACAAANCCNTNNAANNNNGGGGNNNTTTTGNNNCCCNAANCNGGGGCNAAAATTGACNCCCN
CNCGGCNGNNGGACTTNCNTTNGGNNAAAAAAAGTTNNANTNTTNNNATACAANTTANAANTTNA
ANGGGTAATAANNGGNTNNNCNNGCCAAANTGAAGACATAAATACATATNCTGTNGGGCAAANC
NTTTTCACCCGNCCTAAGANAACATGCCCCCCCNCAAAANCAATCCCCNAACNTTTCCCNAANCA
AANGGGGGAGCCCNTTAATCCTGTTTTTAACATACNNGCTCANTGACGNGGGTACTAAGGATAGA
NTCCNCCNCCATTGGGTTTGAGCCATAACTGGANTCCCAAAAGGCTTTGGGGTACCNNACCATTTT
TTNAGGGAGGAGGGGANAAATTGNGTGAATTTACCCCATGCCAAAGCTTAANANGGGCCTCGNCT
AAANCCCACNGGCGCCAATNTNCAAAATCNTGGGTTTCCANCCTCACCTNGGAAATGCCCCCCCA
TTGGGAGGANGGGGGACNTTNGGAAGANGGACCANGGGGGGATTCTGGAANTANCCCCATGCTTT
NAACAAAGCTNAACTTTTNTCCTTT

| | |
|---|---|
| Sequence 345 | cMhvSD059c01 |

CCGGGCAGGTACAGTGGCCCCCCGTGAAAGACAGAATTGTGGTTTTCCTGGTGTCACGCCCTCCCA
GTGTGCAAATAAGGGCTGCTGTTTCGACGACACCGTTCGTGGGGTCCCCTGGTGCTTCTATCCTAA
TACCATTGACGTCCCTCCAGAAGAGGAGTGTGAATTTTAGACACTTCTGCAGTGGATCTGCCTGCA
TCCTGACGCGGNTGCCCGTCCCCCAAGCACCGGTTGAATTAAGTTNCCAGGANCTCGNGCTTGCGC
AACCTANCAACCCGGGAACTNCCTNNANGAACAACGCCTTTTCTGCCAAGCNTGTGGCCCTTCGG
GCTTTCAACAAAACCAACNAGTANTTTGGACNTTGGCTTTCNTGGAACNTATTTGGAACCTTAACC
TTCCATAATAAATTTTGGGGNCCCTTA

| | |
|---|---|
| Sequence 346 | cMhvSD060d09 |

AGGGCNAATTGGAGCTCCCCGCGGTGGCGGCCGAGGTACGCGGGNNACAGANNTNTTNCNANCA
GTTTCTACAAGGCNTGAATCATNGNNNTAAGAANATTGCGANGGGATTACTNACAANAAATTNNN
GTTGACCATCTCNGCAGACACTGGTGTGNGGCGGGAAATTNACCTTTGTTTTTTNCTAGCCNCGGC
TNGNNGNGCTNAATCNNCACCTTNGCCCNNGGNTGCTCNTNCNTNCNNNCCGNNACCNCTGGAGG
NAAANNGTNNCNTATTCTCAGCNANTTCTGCATGCTCTCCNNAGCCTNCTGCANATTCTAACAAGG
GGGGCGCNNGATNCACAATGCCTCTTCCAANCACGAGNGGGTNTTCTTGGGCTCAAAATATATTTG
TTGGATCCANNNNCNGNNATCCTTTTCCAACACATTCCCACCTATTGTGGGAACAGATGGCATTAT
AAGAACATTGTGTTTGATGAAAATC

| | |
|---|---|
| Sequence 347 | cMhvSD060d10 |

NATTGGAGCTCCCCGCGGTGGCGGCCGCCCGGGCAGGTACGGATNCNNCNTGNCCNANGNTGGNN
NAANGGTATCNTNCTGNTTGAACNNCAATTCAGATNATAATGAGGAGNATTNGGCCTNGGAGAAA
CTAAACTGATGGNCTTAATGGGCTAAATNCCNATGNTNAATCCTTATGGATTTTNGGNGCGNTGGG
ATTGTNTGTTGAACTTATTATAAGANAAANGGGCTTCCAAAGTGCGACCACNTACTGTGTTCCCGN
CCTGACAGNNCAATGGCCTAAGCTNNTTTGAAATNTATNAAANGNNCANTNTNTNNANTGNNGAG
CAATGGNTNCTTTCCAGACAGGAAGACTGCTGCTAAGTACCCTCGGC

| | |
|---|---|
| Sequence 348 | cMhvSD061b07 |

CGAGGTACATGTGNGCCCCCCGTGAAAGACAGAATTGTGGTTTTCCTGGTGTCACGCCCTCCCAGT
GTGCAAATAAGGGCTGCTGTTTCGACNACNCCGTTCGTGGGGTCCCCTGGTGCTTCTATCCTAATA
CCATCGACGTCCCTCCAGAAGAGGAGTGTGAATTTTAGACACTTCTGCAGGGATCTGCCTGCATCC
TGACGCGGTGCCGTCCCCAGCACGGTGATTAGTCCCAGAGCTCGGCTGCCACCTCCACCGGACACC
TCAGACACGCTTCTGCAGCTGTGCCTCGGCTCACAACACAGATTGACTGCTCTGACTTTGACTACT
CAAAATTGGCCTAAAAATTAAAAGAGATCGATATTAAAAAAAAAAAAAAANNANNAANNNCCTN
GCCGGGNNAAACCTTTTANATTNGGGNANCCCCNGGGNTNTNNGANNTNNAAAAAAANNNTTTTN
TTCCCNCCCCCNGGGGGGGGGGGCAAAAAAAAAAANTTTTGGNCCCTTTANNGNGGGNNTANTGG
NCCNTTTGCNNCCCCNGGGG

| | |
|---|---|
| Sequence 349 | cMhvSD061d01 |

AATTGGAGCTCCACCCGCGGTGGCGGCNCGAGGTACTTTNTTTTTTTTTTTTTTTTTTTTTTNNNNN
NCCCCCCCCNTTTTTTNAAAANNCCNTTAAANNGGGGGGGGGGNNAAAANCNNNTTTTTTTGGGN
NNNAANNNNGGGGGGGGGGNAAAANNCCCCNCTNNNNNGGNCCCCNTTTTACANTNGGTTNCCN
AANGNTTGAANNTTTNGGGNGNTTNANAAAACCCCNTTTTTNTNNTTTTTTTNNCNAAAAAAATNG
NNGAAAGGNCCANNGCNCNCANCNNCCANANNGNGAAANNCCCGNGGGNNAAANNNGCCCCNA
AAATGGGNCCCCANTTTTTCNCNCNNTNGGGGGGGNNNNAANANTANGGGCCCCCNTAATTTTGA
AANNTTTTTTNNNTCCCAAAANTTCGAGGTGAGNGGANTTTTTTNAAACCCCANCACCCCCNTTTT
AAAAAANNNGNNNTTNNAAAGGCNCNACAAANTTTTGGCNCCCNGAGGGGTCCNGTNNGNGNTN
TTCACNCNGGGGNCNCTTTAAAANATTTTTTTTGGGNNNNNCCNNNAAAAACGGGGTTACTANTN
NCCCCCCATAACCTCAACCTTTGGNANTNCAANTGTGCAATGGCTNGNCCTTGNACCCTNGGGGTT
TTTGCCCCTGNCCCNANNGGGCCCTGCCCTAAAAACCNCANNTTATNCCCCCCCCCTNTTTTAANG
GNNCNTCNATNAANGGNACNTTCTTTTNAAAAAATNNNANANNNNNNNNNNNNNNNNNNGNNCC
CCCCCCCCC

| | |
|---|---|
| Sequence 350 | cMhvSD061d05 |

CGCCCGGGCAGGTACAGTGGTGTGATCTCGGCTCACTGCAACCTCTGCCTCCCGGGTTCGAGTGAT
TCTCCTGCCTCAGCCTTCAGCTTGCACTACCACGCCCAGCTAATTTTTGTATTTTCAGTAGAGATGG
AGTTTCACCATGTTGGCAAAGATGGTCTCTATCTCTTGACCTTGTGATCCACCCGCCTTGGCCTCCC
AAAGTGCTAGGATTACAATATTGGATTTTATGTTAGCACCAGCCTGTCCTTTATTGATCATACCATT
TACCTGGACTCTTTTCTTCAAGAACACAATCTAAGNAATCCTAAACCAGTTTTGACACAAACCATT
GCCTTTAACAACCCATTCATAGTGAGGGGATTTANTGTAGTTTCAATGTCACCATCCAAGATCCCA
CCCCAGTACCTCGGCCGCCCCNGGCAGGTCCCNGGGACAAGGGCNACCCAGCTCTCAAANGAACT
GGNCCAGCTTCCGGATGCCTATTAAAAACAGAAGGAGCNGCTTGNGGNAACAACTAGAANCCCCT
TCCAAGCCAAAAGGAATGGGCNCTTTTTTCAGGAAAGCCGGGAACTTTTTGCCAAANTTNAAAATT
TTATTGGAAAAAACCCCCCGGAACCTGGAGGANGGGGTTTNAGCCTAATTTCTTGGCGGGTTCTTA
ANNAGGAAAAAAACTTGGGACCAAAGGNTTTTNGGNAAAACCCCGCTTGGNANTCCNGGNAAAT
AAAGGNGGTTTTNAAACCCCTGGAACNAAAGGCCCGGGANATTCCCCCTCCAAAAANGGAACCTG
GGGGACCAAATTTCTTTTGGAAGGAAAAAAAAA

| | |
|---|---|
| Sequence 351 | cMhvSD062d12 |

CCGGGCAGGTACTTTTTTTTTTTTTTTTTTTTTTTTTTTTAAAAAANGGGNTTTTTTTTTTCCCCCCNA
GGGGGGGGGGGGGGNNCANTTNNGNTNNNNNGGCNCNTNNNNCNNGGGGNNNAAANNANTTNC
CCNTNTTTNTCCTAAAANNNAAAAAANNCAGGNGTNCCCCCCNCCCCCNTTNNTTTNTAAAAAAN
NNNCNTTTTNAAAAAAGGGGNTTNTNTTNNTTNNCNNNANNNNTNAAAANCNNCNGCCCTAAAAN
NANTTTTNNGCNTNGCCCCCTAAAANNNNNTTTTTNTANGNNNAAANCNAGGGCCNNGGCNNAAA
AANAATTTTNNGCCANNAATNNGAAAAANCCTGNTNTTTTTNTTNAGAGGGGAAANTTTCAANCN
CNNCTTTTTTAAANAAAAAAAGNTTNGTGGGACANANNTGCCNTNAAAAAAAAACANGATATTTA
TGGGNAGATANTTNACCCCATNANNNCNCCNCTGGGGGGGGTTCATGAANACATCCCNCCCCCNN
TAAAAATAGAAAAAACCCCCCCCTGTCGNGAATTTNTTTTAAANTTTTTNNNNCCCCCCCCCCN

| | |
|---|---|
| Sequence 352 | cMhvSD063g04 |

TGGAGCTCCCCGCGGTGGCGGCCGCCCGGGCAGGTACTTTNTTTTTTTTTTTTTTTTTTTTTNTAATT
TTTTTTTTTTTTTTTTTTTTTTTTTTTTTTTTTTTAAAAAAANACNNNNNTTTTTTTNNNGACNCANTT
TTTNNNNAAAAAAAAAANACCCTCNNNTTTTTTTTTTAANGNCNNCNNNNNNTAAAAAAANTTTTT
TTTNNTNCCCNGGGGGGGGGNGCCAACNCNTTTTNAANAAATNCCCANGNGGNGGGGGANCCCN
ANACAATNATNNANGNANCNCCCNAAAAAATTTAAAAAAACCCCCCCNTTTTTGGGGANGANNCC
NNNNNTTTTTNTAAAAAANNCACCGGNCACCCCAAANANGNTTNTNTAAAAAAANCCCCNNTTTT
TTCANAAANGGGGGGGGGNGACNNAAAAAAAAAAAAATTTTTTTTTTTTTGNNGGGGGATCNTTT
TTCCNNGNTTNNAAAAAAAAAAAANCCCCCCCCCNNCGGGAAAAAATTNAAAAANNTTTTTTNNC
CCCCCCCCCCCCGGGGGGGGGCCCCCCCCCCNNTTTTTTTTTTNTTTTTAAANAANAAAAAAAACC
C

| | |
|---|---|
| Sequence 353 | cMhvSD074a08 |

CGANGTACGAGACCTGCTTCTATCTCCTGAAGAAAACTGTGGCNTTCTGGAATGGGAAGATAGGG
AACAAGGAATTTTTCGGGTGGNTAAATCGGAAGCCCTGGCAAAGATGTGGGGACAANGGAAGAA
AAATGACAGAATGACATATGAAAAGTTGAGCAGAGCCCTGAGGTANGTTAATAGCATANAATACT
ATGANCCTTCANGAAGAGTTATATACAATGGCTGGCTGTAGAAAATTACACTGTTTTTGCAGGTTT
TTTACTT

| | |
|---|---|
| Sequence 354 | cMhvSD083h08 |

TGTNTCCACACCTGTCCTNTTGGAGTTTGGATGGCAAAGACNTGCGAGGTGGTTTTGGGCACACCT
AANGTCTGTTTCAGGGGTCCTGAATGAGGTGATTGCNACNACTCAAAGACTAAGTTTNTAAGATCC
CAGGCATGGAGTAAAGCAATTCTATACACAGGATCTCAATCCTAGTCACAAAGACTTCTTAATGAT
ACATGGGCTCAAAGACATNGGTTCCCCTGAACACNTCAGCTTGGATTCATACTGNCCCCATATTTT
CCAGTGTGCCATGTAGTTATCCTTTATNACCCTCGTAACCATGCCCAT

| | |
|---|---|
| Sequence 355 | cMhvSD085d05 |

GNTNTCNGGNTTCCNTCTNNCTNAGNNNAAANNNCNCTTNATNCTGTTGANGCAAGAGNGACNGN
ACATNCANCCCTNNCNACCCAGNCTGNNTTTCACTGNANANCAAGGNTGAGGNAGCTTCAGGGCN
ACACTGCGAGTTTCTATGCATGAAATNNTCCTAGCATTTTGCGTTCTCATAACTANAATATGGCTTG
TGTTGCAAGACCAATGATACTGNGAACNNTANNTNCCCNGNCNGCCNNTCTAGAACNAGTGCGAT
NCCNNGGGCTGCNTGAATTGAGATNTCAATCTTATCCTTNCCGTACGACCTGGGAGGNGGGGCCC
GGCTACCCAGAATTTTGGTTCCCTTTTACNCGAAGGGTCTAATTGCGCTACTTAGGCCGTAAATCA
ATGNAACATGAGCATGNCTCTCCTGGTGGCGAAAAATTGGAGTATANCCGTATCATCAAATATNTC
ACCACGAACTNTACCGCATCACCTTGGAAGCCATTTATAGCAGTTNAAAGCACTANCGGGNTGCC
CTNAACTNGAAGTTGGAANCTTAAAACTTNACCAATTTNAATTTGGCCGTTTNGGGGCATTAAACC
CGCNCCCCCCCCCCCTACCCCCCGNGAANAAANNCTGNCCCCCCNTTNNCCCCCCTTTNATTTTAN
CTCCCCCCCCCCCCCCCCCC

| | |
|---|---|
| Sequence 356 | cMhvSD086h05 |

AGGTACTCATGGTCTGCCAACCCTGGCTTCACTTGGCACGGTTGATTTAGGTGCTCATGTCACCAA
ACAGCAGAGCCATCCTGAGCAGAATTCAGTAGACTATTGCCAACAACTGACTGTGTCTCAGGGGC
CAAGCCCTGAGCTCTGTGATCAAGCTATAGCCTTTTCTGATCCTTTGTCATACTTCACAGATTTATC
ATTTAGTGCTGCATTGAAAGAGGAACAAAGATTGGATGGCATGCTATTGGATGACACAATCTCTCC
ATTTGGAACAGATCCTCTGCTATCTGCCACTTCCCCTGCAGTTTCCAAAGAAAGCAGTAGGAGAAG
TAAGCTTTAGCTCAAATGATGGNGATGAATTATTAGAAATAAACAGACCCCAATTTATNAACTGG
GAAAGCAATTTTNTGCTTGGGNGCTATGCAAATTATGCNTCTGGGGTTTCAATATTGTTTGCTTTTG
GCTTTATTTTTTTTTTTTTTTAAAAGGGAATGTNGNTGGNTTCATTGGNAAAAAAACCTNGTTTTGG
AAAGCCCCACCCNAAAGNAATTTTCCCNNGGGAGGAAAAAAACCNTNANGTGGGTTAAANGGNA
AATTNTTTTGGGGGGGGCCAAAAAAAAAAAANGGGGGGTT

| | |
|---|---|
| Sequence 357 | cMhvSD087d02 |

CGCGTAATACGACTNACTATANGGTNTAANGGNGAANTGCAGCTCCACNGCGGCNGCGGCCCGCC
CGGGCAGGNACNCGNNTTCGTGGCGATANNGGANAGCCCGGTGAAAAGGGGCCNACAGGTCTTN
CTGGCTTAAAGGGACACA

| | |
|---|---|
| Sequence 358 | cMhvSD088e11 |

CTCCACCGCGGTGGCGGCCCGCCCGGGCAGGTACCGCGGGAAGGGCTGCTGTTTCGACGACACCG
NTCGTGGGGTCCCCTGGTGCTTCTATCCTAATACCATCNACGTCCCTCCANAAGAGGAGTGTGAAT
TTTACACACTTCTGCAGGGATCTGCCTGCATCCTGACGCGGTGCCNTCCCCAGCACGGTGATTAGT
NCCANAGCTCGGCTGCCACCTNCACCGGACACCTCATACACGCTTNTGCAGCTGTGCCTNGGCTCA
CAACACAGCATTGNCTGCTCTGACTTTGGACTACTCCAAAAATTGGCCTTAAAAANTTAAAAGGAG
ATCCGATACTTGNAAAGAAATACTAATAAACAAAACAGGNTTCCCTTTNGCGCGCTCTTATANACT
NGGNGGGAANCCCCCCGGGGCNTTGGCAGGGGAAATTTNCNAATTATTCAGANGCTTNNATTCTA
ATTNCCCGTCCNCACCTTCCNAAGGGGGGGGGG

| | |
|---|---|
| Sequence 359 | cMhvSD089h07 |

ATAGCTCCTAATTTAATTATTATAACAAAAATTTACTGAGCATCTACTATGGGCAAACATGGGAAA
TCTAAACATGCNTGAGTCCCAGTCCTAGCTCAGGATGACTTTANAACCTAANGGAAAACATAAAC
ATATACAGAAGGAACGTCAACCCAACATCAGAGTCTTTTTAANGGTTATATANAACATCCTTCAAG
ACNCCACANAANANCNCGCCTGANGGGGTGCCTGCCACAAAGGATGTGAGGGGTAAGCAGGGCG
GGCAGNATTTCCCAATCCCGCTGATCTCCACAACCATAGGAGGGGGCAGCTTCCNTTCCCCCATTC
CATATCAGTCTATTCATACNTTACAAGACAAAAGTNTGATTCCTTCCAANAAANAGTNTGCCANGG
ACCACNCACATACNGGATTTTACAGAATCTTTGAAATCATNTNTTTTCAACATTGTNATCGTTCAG
ATAAANAAAATGANATCAGGCCTNCACTGGCACTGAATCAAAGTNTTTGGGGAGATAGGCCCCAA
AAATTTNTTTAAAAAAATAAAAATG

| | |
|---|---|
| Sequence 360 | cMhvSD090c07 |

AGGTACGCGGGGGAGGAACTGCTCAGTTAGGACCCAGACGGAACCATGGAAGCCCCAGCGCAGC
TTCTCTTCCTCCTGCTACTCTGGCTCCCAGTTTCAGATGCCAGTGGAGAAATAGTGATGGCGCAGTC
TCCAGCCACCCTGTCTGTGTCTCCAGGAGAAAGAGCCACCCTCTCCTGCAGGGCCAGCCAGAGTGT
TAGCGGCAACTTAGCCTGGTATCAACATAAACCTGGCCAGGCTCCCAGGCTCCTCATCTATGGTGC
ATCCACCAGGGCCACTGGTA

| | |
|---|---|
| Sequence 361 | cMhvSD090c07 |

AGCAGTATAATCACTGGCCTTCTTTTGGCCAGGGGACCAAGCTGGAGATCAAACGAACTGTGGCT
GCACCATCTGTCTTCATCTTCCCGCCATCTGATGAGCAAGTTGAAATCTGGAACTGCCTCTGTTGTG
TGCCTGCTGAAATAACTTCTATTCCCAAGAGAGGGCCAAAGTTACCTGCCCGGGGCCGGCCGCTCT
TAGAACTAAGTGGGATCCCCCGGGCCTGCAGGAATTTCGATATTCAAAGCTTTATCGATACCCGNT
CGACCTCGNAGGGGGGGGCCCCGG

| | |
|---|---|
| Sequence 362 | cMhvSD092h01 |

GGCCGCCCGGGCAGGTACAATGCAAAAGATTCAAAGCCCCTTCCACTCTCTTCCAGTGTGCAAGAT
GAAAGAATGCATATGCTATTGCTTCACTGTCTCCTCTCTTCAGGATATGTTCTGGGGGTAGGATTA
AGCTTTTCATTTCTAGTAGGTATTTTGGCACATGAGGATTGAATTCCACAGCTCTATGAATGGGCCT
CTACTGGCATTCATCTCTTGCTGGTGCTCAAGCCCCCCGCCGAGAATGCCAGCCCTCAAGGAAGAA
GAAATTTTGTCAAGAAAAACAGCTCTTTGGCTTTTGGAGCCAAAAGCCAGCCTGGTGGTAAGCAAT
ATTTGGTTGGCTTGACCTTTTGGGTAAAGCCTTAATATCAATCAATACCTTTTGGCTTAAAGAACTT
GGNCCTGGAACCATTCAAGCCATTATTGCCTTTGNTAAGTTTCCCANNAAAGGGGCCTTTCTTAAA
AAANGGTTTTTCAATTGGGANTATTTGGAACCATACCTCAGAAANGGGGGGA

| | |
|---|---|
| Sequence 363 | cMhvSD093g05 |

AGGNACTTTTTTNTTTTTTTTTTTTTTTTTTNGGAATTATCTTGATTTCCTTTCACTACCAAGAAAAN
AAATACTTNAATNCNTTAGNNAATATTTTTGGGGTANNANAAAATTTTTAAGACNGTAGTTATGAG
TANNATGTGTATTCACAACAGNAATNTTCCCCCTGGNAGAGNGNGCTNANAATANACCTGCTNTG
GGNTAAAANANCTNNANGGCTTTGGACATTGCCTTTACATTCAAAAATGGAGTTCANTGTCATGGC
CNGAAAANANGNANTCCCCNAGGGAAAGCCAGGGAACCCNCCCGCTTNNAAAAGCNTTGGGCCT
TTAGGGAANAAAAGCNAGAAGAAGGCTTGGGGTTGCCNTTTCCCCCCACNCTGGATNTCCCCCAA
NCCTATTTTGGNTTTCTTGTTGAANGTTTCCAAAANCCNTNNCCNNAAAAACTTNTTGGGGGCCAA
AAGTTCACCTNTTANTACAANGCTTGNGGAANCCCCANTNTTNNTCCNCCCCGNTCCGTTTATGNA
GCCCAGNCAATTNAATNNGGGACCTTCCCTTGGGGCTTT

| | |
|---|---|
| Sequence 364 | cMhvSD093g12 |

TANCGTGGGNGCNGNCGAAGTNCTNNGTTAACTGCCTTTATATCATGCTNAAGTNNAANGCTAATT
TGAGTTTGAAATACNGTGGCTAATAGAGCTAANAAAACACATTCATCATCATTCTCTGGTATTNTC
TAATGTCTTCTGGTAGCTCCCACTCATCCCCAGAGTAGCCAAGGTTGAACTTGAACC

| | |
|---|---|
| Sequence 365 | cMhvSD094a09 |

AGGTACAAATTTGGAAAAAAATGCACACGGGTGGCAGGAAGACAAGCTATGATCTGCTCCAGGCA
TCAAGCTCATTTTATGGATTTCTGTCTTTTAAAACAATCAGATTGCAATAGACGTTCGAAAGGCTTC
ATTTTCTTCTCTTTTTTTTAACCTGCAAACATGCTGATAAAATTTCTTCACATCTCAGCTTACATTTG
GATTCAGAGTTGTTGTCTACGGAGGGNGAGAGCANAAACTCTTAAGAAATCCTTTCTTCTCCCTAA
GGGGATGAGGGGATGATCTTTTGTGGTGTCTTGATCAAACTTTATTTTCCTAGAGTTGTGGAATGA
CCAACAGCCCATGCCATTGATGCTGATCAGAGAAAAAACTATTCAATTTCTGCCATTTAGAGACAC
ANTNCNAATGNCTCCCATTCCCCAAAGGGTTCCAAAANGTTTTTCAAAATAAACCTGNNGGCAGCT
TCACCAAANGTTGGGGGGGAAAAGGCATTGAATTAGGTTTGGCANGGTTATGGTAAGGGANAAGG
GGTGAAGAATTTAAAAGAANNTTACNTACNTTTTNAANTTTTTAAAATTTANTTTTAAAGGTCNTA
AAAANTCCCATTNNGAAAAANNTTTTCCCCCNTTTTT

| | |
|---|---|
| Sequence 366 | cMhvSD015e12 |

GCCCGCCCGGGCAGGTACTTTCATNGNGTTNGNGATGTTNTNNTGNGACAGTGTCTCACTAGNGCA
GTGGCCGCTATCTTGGCTCACTGCAACCTCCTTCTNTTGGGTTCAAGTGATCCTCATGCTTCANAGA
TGGGG

| | |
|---|---|
| Sequence 367 | cMhvSD019e03 |

CNGGCCANGTACGCAGGGGGCCCCGNCGGNCATCGTTGAGCCCCGC

| | |
|---|---|
| Sequence 368 | cMhvSD026g08 |

ACGACTNCTATAGGGCGAATTGGAGCTCCCCGCGGTGGCGG

| | |
|---|---|
| Sequence 369 | cMhvSD026h12 |

CTNCTTAGGGCGAATTGGAGCTCCCCGCGGTGGCGGCCGCCCGGGCAGGTACAGAACTTAAGACA
CNACTATTNGNTGAGATGAANAAANGCATATATNGGANGCCTTCANAATGAAATGGTCAGAGGGN
GAGTTTACACAGATNGA

| | |
|---|---|
| Sequence 370 | cMhvSD029e08 |

GCTNTTATAAATGANTAAATANGCTAAGAATAG

| | |
|---|---|
| Sequence 371 | cMhvSD029f06 |

CCGGGCAGGTACTCTGCGTTGTTACCACTGCTTACTTTTTTTTTTTTTTTTTTTTTTTTT

| | |
|---|---|
| Sequence 372 | cMhvSD032c10 |

AGGGCGAATNGGAGCTCCCCGCGGTGGCGGCCGAGGTACCCGAATTTAATNCGAGTGGTCATCAC
AGTCCCCGAGGTGATGATGCTGGAGGCGT

| | |
|---|---|
| Sequence 373 | cMhvSD032f12 |

GGAGCTCCCCGCGGTGGCGGCCCGAGGTACTTTNTTTT

| | |
|---|---|
| Sequence 374 | cMhvSD040e06 |

CCGCCGTAATACCGACTCACTATTAGGGCCGAATTGGAGCTCCACCGCGGT

| | |
|---|---|
| Sequence 375 | cMhvSD040e10 |

CTCCCCGCGGTGGCGGCCGNCNGGCCAGGTACTTTTTTTTTTTTTTT

| | |
|---|---|
| Sequence 376 | cMhvSD041b10 |

AATTGGAGCTCCCCGCGGTGGCGGCCGCCCGGGCAGGTACTCCAGCCTGGGCGACAGACCAAGGC
TCTGTCTCAAAAAAA

| | |
|---|---|
| Sequence 377 | cMhvSD048e04 |

AATTGGAGCTCCCCGCGGTGGCGGCCGANGTGAGAGGATGGCTTGAGTCCAGGAGGTCAAAGCTA
CAGTGAACCATGTTTGTGTGGAGTGCCACTGCACTCCANCCCAGGTGACANAGCAAGACCGTGTC
ATAAAAAATAAACCACACNCAAANAGAGAANGATCTTTATGGATNAAAAAGATAATAATAATGT
GTATTTACTGAATGCCAATTATCTATCCAACCTGGTG

| | |
|---|---|
| Sequence 378 | cMhvSD053g06 |

AGGGCNAATTGGAGCTCCACCGCGG

| | |
|---|---|
| Sequence 379 | cMhvSD053g08 |

CCGCGGTGGCGGCCGAGGTACTTTTTTTTTTTTTTTTTTTTTTTTTGAGATAAGTCTCGCTCTGTCAC
CCAGGCTGGAGTGCAGTGGCATGATCTCGGCTCACTGCAAGCTCCGCCTCCTGGGTTCATGCCATT
CTCCTGCCTCACCTCGGAGTAGCTGGGACTACAGGCGTCCGCCACCGCGCCTGGCTCATTTTTTTTG
TATTTTTAGTAGAGACGGGGTTTCACGGTGTTGGCCAGGATGGTCTCGATCTCCTGACCTTGTGATC
CACCCGCCTCGACCTTCAAAGTGCTGGGATTACAGGCGTGAGCCACCGCGCCCAGCCGAGTTCAG
ACTATTTGGNGGGCAACAGCAAGACATGGTTTTTTAGG

| | |
|---|---|
| Sequence 380 | cMhvSD055f02 |

CCGCGGTGGCGGCCGCCCGGGCAGGTACTTTTTTTTTTTTTTTTTTTTTTGGAGATGGAGTCTTGCA
GTGTTGCCCAGGCTGGAGTGCAGTGGCACGATCTCAGCTCACTGCAAGCTCCACCTCCCGGGCTCA
AGCGATTCTCCTGCTCANCCTCCTGAGTAGCTGGGATTACAGGCGTGCGCCACCACGCCCAGCTCA
TTTTTGTATTTTTAGTAGAGACCGGGTTTCGCCATGTTGGTCAGGCTGGTCTCGAACTCCTGACCTC
GTGATCCGCCTGCCTCGGCCCCGCAAAGTGCTGGGATTACAGACGTGAGCCACCACGCCCAGCTG
GAAGTTAACTTT

| | |
|---|---|
| Sequence 381 | cMhvSD057e05 |

AATTGGAGCTCCCCGCGGTGGCGGCCGCCCGGGCAGGTACTTTTTTTTTTTTTT

| | |
|---|---|
| Sequence 382 | cMhvSD057g11 |

ATAGGGCGAATTGGAGCTCCCCGCGGTGGCGGCCGCCCGGG

| | |
|---|---|
| Sequence 383 | cMhvSD058f11 |

GGAGCTCCCCGCGGTGGCGGCCGNCCNNGCAGGTACTTTT

| | |
|---|---|
| Sequence 384 | cMhvSD063h09 |

GAGCTCCACCCGCGGTGGGCGGCCGCCCGGGCAGGTACGCGGGGCTTGAACCCGGAGTCAACAGA
GACTCCATCTCAAAAAAAAA

| | |
|---|---|
| Sequence 385 | cMhvSD067b08 |

CCGGGCNGGTNCTCAGACTACCACANATATTCCCTTACGGNCCAGGTCTCTCATGTTATGCTGTTTT
TTCCAACCTGAGCT

| | |
|---|---|
| Sequence 386 | cMhvSD070d03 |

CAGAATCCTGGCCAGGNNCCNAGGCTNNTC

| | |
|---|---|
| Sequence 387 | cMhvSD070h05 |

GGAGCTCCCCGCGGTGGCGGCCCGCCCGGGCAGGTACTTTTTTTTTTTTTTTTTTTTTTTTCCTTTTT
TTTTTTTTTTTTTTTTTTTTTTTTTTTTTTTTTTTTTTTTTTTTTCCTTTTTTTTTTTTTTTTTTTTTTTTTT

| | |
|---|---|
| Sequence 388 | cMhvSD074e01 |

TATAGGGCGAATTGGAGCTCCCCGCGGTGGCGGCCGAGGTACTTTNTTTTTTTTTTTTTTTTTTTCCT
T

| | |
|---|---|
| Sequence 389 | cMhvSD085b12 |

TGACTTTGATGTGTGACAACAGGCACCANCNATCGCCAACTAGANAAGCTCACCAGANCTCNGAT
GNNGGAAGCTTNTATNGGGGCCTCAGCAT

| | |
|---|---|
| Sequence 390 | cMhvSD086f10 |

CCGGGCAGGTACAGTGGTGTGATCTCAACTCACTGCAACCCTCTACCTCCTGGGTTCAAGTGATTC
TCCTGCCTCAGCCTCCTGAGCAGCTCANATTATAGGCACCCGCCAACATGCCCGGCTAATTTTNGT
ATTTTTAGTAGAGACGGGGTTTCACCATGTTGGCCAGGCTGGTCTCGAACTCTNGACCTCAGGTGA
TCCACCCGCCCCAGCCTNCCAAAGTGCTGGGATTACAGGCATGAGCCACCGCGCCTGGCCAAAAT
GAAGCATTTTTTTAAACCAAACTGTTTNTTTGCTAGNGTGATCTAGCCATGGNATTCATTCCACTGT
GCTCTATTTCTTT

| | |
|---|---|
| Sequence 391 | cMhvSD090c01 |

AAGCCTCAAGAGAGCAGACACGTGCTGAAAANNTNCTGNGCAGNCCNGATTNCCCTAAACTNTGG
TNAGTAACAGGTCTGCCTG

| | |
|---|---|
| Sequence 392 | cMhvSD014f05 |

CGCCCGGGCAGGGTACTTTTTTTTTTTTTTTTTTTTTTTTTTTTTTTTTTTTTTTTTTTTTTTTTTT

| | |
|---|---|
| Sequence 393 | cMhvSD074h03 |

CGCGGTGGCGGCCCGAGGTACTCGAGCCNNATGGAGTNGNNCNGCNCATCGANCAGACNCACGG
ACGTGTCCCAGGAGGAGACAAGC

| | |
|---|---|
| Sequence 394 | cMhvSD062h08 |

CGCCCGGGCAGGTACTTTTTTTTTTTTTTTTTTTTTTTTAAAAAANNATTTTTTTTTTNGCCCCNNGG
NNGNAAAAAAANANNNAATTNTAAANNNNNNNNNCCNNCCCCNNTNNGNNTAAAAANNATTTTN
TGCCNTANNCNNNNAAAGGGGGGGGNTTNTNNGNCCCCCCCNCCNCCCCCNNNTTNTTTTTTTTTT
TTT

| | |
|---|---|
| Sequence 395 | cMhvSC006f04a1 |

GCTGATTGGAGCTCCCCGCGGTGGCGGCCGAGGTACAAGCAGTAATTGATTCACTGGCCTTGGACT
ACTTGCAGGTCAGCTTGTCTCACATAACAGGTTGGTATATGTATAACTATCACATAATTATGCATTT
TAGTAAAAATAATTGTTTAGAACTGGCTTCGGGCAGTTGTGACCTCTAACTGTAATTTCCTTGCTTC
TTCTGTATGTTTCCACCTCTTGTGCTGTGCGCCTAGCCAAATCANAGTGCTCTTGATAAAAATTCTT
CTCAAATTTAGGCAGCTCATCAAGATTCCACTTCTTTTTAACTAATTTCTCCCCAGGGTTTCCAAAC
TTNTTTCCAGATAAGGGCCCTGCCCTACTTCCTCCAAATCGAGGTGCACCAAACCCTCGGTCC

| | |
|---|---|
| Sequence 396 | cMhvSC008h12a1 |

CGCCCGGGCAGGTACGCCGGGTGGCGTCACGCCCTCCCAGTGTGCAAATAAGGCTTGTTGTTTCNA
CAAACCCGTTCGTGGGTCCCTTGTGCTTNTATCTAATACAATCGACTTCCTTCCAGAAAAAGGAAG
TGTGAAATTTAAAACCTTNTTGANGGAATTTGCTTCANTCTTGACCCGGTGCCCGCCCCAACACGG
GTGAATAATTCCAAGANGCTCGGNTTGCAACTTCAACCGGAACACCTTAANAACACGCTTNTTCAG
CTTGTGCCTTNGGNTTAAAACAAAAAAATTGACTTGNTTCTGACTTTGACTACTTNAAAATTGGCC
TAAAAATTAAAAAGAAGAATCGATCCCAAAAAAAAAAAAAAA

| | |
|---|---|
| Sequence 397 | cMhvSC008c11a1 |

CCGGGCAGGTACTACTGCTGAGCTGACTGTCAAACCACAAGATGCAGTCCTTCCCACTCTTCCTCT
CCTTTCCAAAGGCAGAGGAGCCTCATCCCATAGCCGCCACCAGCCCTAGTATGAGGAGTACCTCG
GCG

| | |
|---|---|
| Sequence 398 | cMhvSC007d11a1 |

AGGTACCAGCTGTAACCAATACGATTCTGGGGCAGGTTGTGGGCGAGTAGAAGAACCTCCTTCCC
CTCTGCGACATTGAATGGCGTGGATTCAATAGTGAGCTTGGCAGTGGTGGGTGGGTTCCAGAAGGT
TAGAAGTGAGGCTGTGAGCAGGACCTCCTTCCAGGGGACATGCAATCTGCAGGGAGGGGCTGAGG
GGGGTCCCATGGTCTCTGCTGTCTTCTCTGTCCGCCTCTTTGTAGAGGAGCTTGAGCTCCAGGAATG
CTCTGGTCAGGGCTGCTGTGACTGTTGGCCCTGCTGTCCTTCCTCCTTCTGTCCCCGCGTACCTGCC
CGGGCGGCCGCTCGAGGGTCTTTGTCTTTCTTGGCCCGACTTTCCAGCGTCCTTCTTCTTCTTGTCGT
CCTTAGGCGGCATTGCGAAGCTCGGAGAATAGCTGCAGACACCGCAGCCTCGTCAAGATGTCGGA
CAAAAAAAAAAA

| | |
|---|---|
| Sequence 399 | cMhvSC008d09a1 |

TGGAGCTCCACCCGCGGTGGCGGCCGTTAAACATGTGTCACTGGGCAGGCGGTGCCTCTAATACTG
GTGATGCTAGAGGTGATGTTTTTGGTAAACANGCGGGGGTAAGATTTGCCGATTNCCTTTACTTTT
TTTAACCTTTNCTTTATGAACCATCCCTGTGTTGGGGTGAAAGTGAGGGTAAATAATGACTTGGTG
GGTGAATTGGAAAAATTGGGCTGGTAAATGNCAAGTCANTGGTTTAATCTGACCCCAGCTTATGCC
GGAGGAAAAAATGGTTTCAATGTTACTTATCCAACATTAATTCTTCTATTAGGGNGAANAGAATTG
GTCCCAATTGGGTGGTGAAGGAGGTCAATTATATGGTTNGGGAATTT

| | |
|---|---|
| Sequence 400 | cMhvSC008c05a1 |

AGGTACAACGCAGAGCAGGTCCTGAGTTGGGAGCCAGTGGCCCTGAGCAATAGCACGAGGCCTGT
TGTCTACCAAGTGCAGTTTAAATACACCGACAGTAAATGGTTCACGGCCGAGGTACTTGTTGTTGC
TTTGTTTGGAGGGTGTGGTGGGCTCCATTCCCGCCTTGACGGGGGCTTGCTATCTTGCCTTCCAGGC
CACTGTCACGGCTCCCGGGTAGAAGTCACTTATGAGACACACCAGTGTGGCCTTGTTGGCTTGAAC
TCCTCAGAGGAGGGCGGGAACAAGAGTGACCGAGGGGGCACCTTGGGCTGACCTAGGACGGTCA
AGCTTGGTCCCTTCCGCCGAACACCCAATTGGTGTCGGC

| | |
|---|---|
| Sequence 401 | cMhvSC008f05a1 |

AGGTACAGCAAAAACCCACCTGTGTAAACACACACAGCAAAGTGATGTAAGAAGTTTCCATATAA
AGGGCTGCAGTATGGGAGAGGTAATGTGCAGGCTGGTTGCGGTTGTAGGGGCCCACCTTACTGAA
CTTTTCCATGATATGGGACCTGCCCGGCCGGGCCGTCTA

| | |
|---|---|
| Sequence 402 | cMhvSC008h03a1 |

GAGCTCCCCGCGGTGGCGGCCGAGGTACACCAATTGAGGAGAGACACATGGGTGGGAAATTGCAA
TAAAAAGACGGCCCATAGCAGGCTGCATTCCCATGGCTGGCCAGAGGAGGAACGCTTTGTGTTCT
CATCGGAGCTGCATGGGAAGTCTGCATACAGCAAAGTGACCTGCATGCCTCACCTTATGGAAAGG
ATGGTGGCTCTGGCCTCCTGTGGCTGGCCTTGGTCTCCTGCATTCTGACCCAGGCATCTGCAGTGCA
GCGAGGTTATGGAAACCCCATTGAAGCCAGTTCGTATGGGCTGGACCTGGACTGCGGAGCTCCTG
GCACCCCANAGGCTCATGTCTGTTTTGACCCCTGTCAGAATTACACCCTCCTGGATGAACCCTTCC
GAAGCACANAGAACTCANCAGGGTCCCAGGGGTGCGATAAAAACATGAGCGGCTGGTACCTGCCC
G

| | |
|---|---|
| Sequence 403 | cMhvSC008f12a1 |

GGACCGAGGGTTTGGTGCACCTCGATTTGGAGGAAGTAGGGCAGGCCCTTATCTGGAAAGAAGTT
TGGAAACCCTGGGGAGAAATTAGTTAAAAAGAAGTGGAATCTTGATGAACCTGCCTAAATTTGAG
AAGAATTTTTTATCAANAGCACCCTGATTTGCTAGGCGCACAGCACAAGAGGTGGGAAACATACA
GAAGAAGCAGGGAATTCAGTTAGAAGGTCACAACTGCCCGAAACCCAGTTCTAACAATTATTTTA
CTAAAATGCATAATTATGTGATAGTTATACATATCCAACCTGTTATGTGAGACAAGCTGACCTGCA
AAGTAGTNCAAGGCCAGTGAATCAATTACTGCTTGTACCTGCCCCGGGCGGCCGCTCTAAACTAGT
GGATN

| | |
|---|---|
| Sequence 404 | cMhvSC006f03a1 |

AGGTACACACTGAAACCACTGTCAGATTAANAAACTACCACAACTTGTCTCAGNTNTTCAAACAAT
GAATCAAGTNCCNTGGNGNNGGCTGNNNATTAATCCTGTNTTGGCACTGCTGNTGGCTATNAAAC
TCACCNNCAAGGGTAAACGATNAAATTGAACCACCTGGTAGGNGTTATATTAACANATGATACTT
TTATTNTTGGAAANTCCAAGTTTGCTTNCTTGGTCTGNTGCAAGGGCAAANGNGGATNAGAAACC
ANGTNGCAAAGCNTGCTCTGGAGCATTGTCATTTNCCANTTTAATAACANGTACCTGCCCGGGCGG
NCGCCCGGGCAGGTACTTCACTGGAAATATGGGCGCCNAGGTGGCCTTCAACTGGATCATTGTTCA
CATGGAANANCCANATTTTGCTNAACCCACTNACCATGCCTGGTTATGGAAGGGCATCTTCTGCTN
GANCCTCTATTTNTGNTGCTTCTTGGACTGAATAACCAACCTCCAAAAAAAAATCTANCTATCATC
ACCTCCANTGGAATTTCANCNAAATCNAGCTATTTCAAAGCACTACCANCAACAAATAATAACCT
ACAAAAAAACACTTNCATNNGNATCTTTANCCACCCCTAAATT

| | |
|---|---|
| Sequence 405 | cMhvSC008d04a1 |

AGCTCCACCGCGGTGGCGGCCCGAGGTACGCGGGGGGCGCCATTTTGTCTCGGCAGCGGTGGCCC
GTAGCTCCATCGCATTTTATGTTTCTGGCGAGAAGGGAACGGAGTTTTCATCAGGTAGATTGGTTT
TGT

| | |
|---|---|
| Sequence 406 | cMhvSC009b06a1 |

GCTCNCCGCGGTGGCGGCNCGAGGTACAGCATTTCCTGGAGGATCTCTGGAGCGATATAGTCTGG
CGTGCCACAGAATGTGGCCGTGGTGACACCATTGCAAATCCCCTCCTTGCACATTCCGAAGTCTGC
CAGTTTACAGTGACCCTCGTGGTCCAACAGGACATTGTCCAGTTTCAGATCTCTCATACTCAGCCT
ATACCCCATCCTCCACTCTAGCACCCATCTCTACCCATCAGAGTCAGAATGAACACCCATAGGGGA
GGTGGCCACTGTGTGCCCCCCCGCGTACCTGCCCG

| | |
|---|---|
| Sequence 407 | cMhvSC009h03a1 |

AGGTACCAGGATGTCCAGTGCGACCATCTTTTCCAGCAGGGCCAGAAGGACCAGCAGGGCCCCTA
GGACCAGCAGGACCCACGGAGCCAGGAGCACCTT

| | |
|---|---|
| Sequence 408 | cMhvSC009h03a1 |

GGGCTCTCCCTTACCCGCGTACCTGCCCGGGCGGCCGAGGTACACGTCTCTGTCTGGGCCTCGGCC
AGGGTGCCGAGGGCCAGCATGGACACCAGGACCAGGGCGCAGATCACCTTGTTCTCCATGGTGGC
CATTGCCTCCTCTCTGCTCCAAAGGCGACCCCGAGTCAGGGATCCCCGCGTACCTGCCCG

| | |
|---|---|
| Sequence 409 | cMhvSC010e11a1 |

NATTGGAGCTCCCCGCGGTGGCGGCCGCCCGGGCAGGTACTGTCCAACTGGATGCTGCCCTGGTG
GCTGAAGGCACACTTCATGATGCTGTCCAGGGTCATCAGGGAGACATGTTGAAAGAGCTCCAGGC
GTGAGTTTTGGGCAATGTGTTCCTCCCATTTGTTCAGCATCATCCGAACACTCTCAGACATCATGGT
GATGAATATTTTCAGAATGCTGATGTTGAAGCCAGGTTTCACAATCTGGCGGTACCT

| | |
|---|---|
| Sequence 410 | cMhvSC016e09a1 |

AGGTACAAGCAGTAATTGATTCACTGGCCTTGGACTACTTGCAGGTCAGCTTGTCTCACATAACAG
GTTGGTATATGTATAACTATCACATAATTATGCATTTTAGTAAAAATAATTGTTTAGAACTGGCTTC
GGGCAGTTGTGACCTCTAACTGTAATTTCCTTGCTTCTTCTGTATGTTTCCACCCCTTGTGCTGTGCG
CCTAGCCAAATCAGGGTGCTCTTGATAAAAATTCTTCTCAAATTTAGGCAGCTCATCAAGATTCCA
CTTCTTTTTAACTAATTTCTCCCCAGGGTTTCCAAACTTCTTTCCAGATAAGGGCCCTGCCCTACTTC
CTCCAAATC

| | |
|---|---|
| Sequence 411 | cMhvSC016b09a1 |

AGGTACAAGCAGTAATTGATTCACTGGCCTTGGACTACTTGCAGGTCAGCTTGTCTCACATAACAG
GTTGGTATATGTATAACTATCACATAATTATGCATTTTAGTAAAAATAATTGTTTAGAACTGGCTTC
GGGCAGTTGTGACCTCTAACTGTAATTTCCTTGCTTCTTCTGTATGTTTCCACCTCTTGTGCTGTGCG
CCTAGCCAAATCAGGGTGCTCTTGATAAAAATTCTTCTCAAATTTAGGCAGCTCATCAAGATTCCA
CTTCTTTTTAACTAATTTCTCCCCAGGGTTTCCAAACTTCTTTCCAGATAAGGGCCCTGCCCTACTTC
CTC

| | |
|---|---|
| Sequence 412 | cMhvSC014g04a1 |

GGACCGAGGGTTTGGTGCACCTCGATTTGGAGGAAGTAGGGCAGGGCCCTTATCTGGAAAGAAGT
TTGGAAACCCTGGGGAGAAATTAGTTAAAAAGAAGTGGAATCTTGATGAGCTGCCTAAATTTGAG
AAGAATTTTTATCAAGAGCACCCTGATTTGGCTAGGCGCACAGCACAAGAGGTGGAAACATACAG
AAGAAGCAAGGAAATTACAGTTAGAGGTCACAACTGCCCGAAGCCAGTTCTAAACAATTATTTTT
ACTAAAATGCATAATTATGTGATAGTTATACATATACCAACCTGTTATGTGAGACAAGCTGACCTG
CAAGTAGTCCAAGGCCAGTGAATC

| | |
|---|---|
| Sequence 413 | cMhvSC027b01a1 |

AGGTACTGGCAAAAAAAGATGCTCGGTGGTTCCAGCAGAAGCCAGGCCAGGCCCCTGTGTTAGTG
ATGTATAAAGACAGCGAGCGGCCCTCAGGGATCTCTGAGCGATTCTCCGACTCCAGTTCACGGACC
ACAGTCACCTTGACCATCAGTGGGGCCCACGTTGAGGATGAGGCTGACTATTACTGTTACTGTGCG
GCCGCGGTCTCGGTCACTCGAATAACCCGACATGGCGTCAATGGTTGCGGTTGGCGGGGAACGAA
GTATATAGAAAAGCGTGCGACAAGTCGCTGGAAATGGCCTCGATGACGGCGAAGCCTTGCGGGGG
CGGCAGCGGAGGAA

| | |
|---|---|
| Sequence 414 | cMhvSC028f01a1 |

AGGTACAGCATTTCCTGGAGGATCTCTGGAGCGATATAGTCTGGCGTGCCACAGAATGTGGCCGTG
GTGACACCATTGCAAATCCCCTCCTTGCACATTCCGAAGTCTGCCAGTTTACAGTGACCCTCGTGG
TCCAACAGGACATTGTCCAGTTTCAGATCTCTCATACTCAGCCTATACCCCATCCTCCACTCTAGCA
CCCATCTCTACCCATCAGAGTCAGAATGAACACCCATAGGGGAGGTGGCCACTGTGTGC

| | |
|---|---|
| Sequence 415 | cMhvSC040c11a1 |

CCGCGGTGGCGGCCCGAGGTACTGGCAAAAAAATATGCTCGGTGGTTCCAGCAGAAGCCAGGCCA
GGCCCCTGTACTGGTGATTTATAAAGACAATGAGCGGCCCTCAGGGATCCCTGAGCGATTCTCCGG
CTCCAGCTCACGGACCACAGTCACCTTGACCATCAGCGGGGCCCACGTTGAAGATGAGGCTGACT
ATTACTGTTACTCTGAGGCTGACAACAATAGGGTGTTCGGCGGGGGGACCAAGCTGACCGTCCTA
GGTCAAGCCCAAGGCTGCCCCCTCGGTCACTCTGTTCCCGCCCTCCTCTGAGGAGCTTCAAGCCAA
CAAGGCCACACTGGTGTGTCTCATAAGTGACTTCTACCCGGGAGCCGTGACAGTGGCCTGGAAGG
CAGATAGCAACCCCGTCAAGGCGGGAGTGGAGACCACCACACCC

| | |
|---|---|
| Sequence 416 | cMhvSC033e12a1 |

ACTTAGGGCGAATTGGAGCTCCCCGCGGTGGCGGCCGAGGTACTACCCCTTCCCCAACCCCAGGG
AATGCAGCTCCTGACTCCAAAAGAGACCCTTCCTTCCTCTTGGGGAGAGGAGGGAGAAGAGTAAA
GAGGACTTTGTCTTGCATTGAAGTCCTCTTTGATGAGTGGGGATTCCTAGCTCCCAGAAACCATTTT
TAGAAACACCCTGGGCCAGAAGGGAACCTGCTGCCATGAAGGAAAGGACCCAGTCCTTGCGGAAT
ACGTCACCTGCTGACTAAAGATCCCTTGGGCCTTGAATAACCAGCAGCAATATCCAAGTAGTATAC
CATGGGCCTTGGGTGAAACTCTGAGACTTTCTGGCTCCAGGTGAAACCCAGCATATTGCCAGCTGT
GGTGGCTATAGTGAGAGACTTCTTCTGCTTGAGAAAAGCTGAAGGAAAAATAAAGCAGTATTTGC
CTTGTACCTGCCCG

| | |
|---|---|
| Sequence 417 | cMhvSC033a02a1 |

CTACTTAGGGCGAATTGGAGCTCNCCGCGGTGGCGGCCGCAGAAGGTCCCGGCAGCAGCAGGAAG
AAGACGGACCCCGCGATGAGGGCGGCGGCAAGGAGCACCTTCATGTTNGGTTCGGNAAGGCGCA
GCATCCCCGCGTACCT

| | |
|---|---|
| Sequence 418 | cMhvSC032f05a1 |

AGGTACACAAACCGTATGTTAAGTAGCGCAGCCAGCAGCTCACCACAGGGAAAAACAGCATCTGC
AAAAACGATGTCAAATCTTGACTCTTGTAGTTTTTTTCATAACTTTCTTATTTGAAACTACATCTTT
ACAGAAGTTTCTAAATATGTCATATAATTCCCACACGAGCGGCCGCCCGGGCAGGTACTTGTTGTT
GCTTTGTTTGGAGGGTGTGGTGGTCTCCACTCCCGCCTTGACGGGGCTACTATCTGCCTTCCAGGCC
ACTGTCACGGCTCCCGGGTAGAAGTCACTTATGAGACACACCANTGTGGCCTTGTTGGCTTGAAGC
TCCTCA

| | |
|---|---|
| Sequence 419 | cMhvSC031h07a1 |

CGAGATACTGTCCAACTGGATGCTGCCCTGGTGGCTGAAGGCACACTTCATGATGCTGTCCAGGGT
CATCAGGGAGACATGTTGAAAGAGCTCCAGACGTGAGTTTTGGGCAATGTGTTCCTCCCATTTGTT
CAGCATCATCCGAACACTCTCAGACATCATGGTGATGAATATTTTCAGAATGCTGATGTTGAAGCC
AGGTTTCACAATCTGGCGGTGCTTTTTCCATTTAGAACCATCCAGGGTCACAAGTCCTCGACCAAC
CCAGGATTCAAGGATTTTGTGGCTAACAGCACTTTTGGGATCTTGTCTTTTCAGGAGAATCTTGGC
ATAGTCTGGGTCATGGACACTGAAGAACATCGTAAAGGGTCCAACCCACAAGGGAACAGCACATG
GGTATTTTTCCATCAGCTTATGATACACCTCAAACTCCTTTACTGGGTAAAACTCCTTGTGGCCATA
GAACCAGTGGGCAGGGGGTGCAGGAAACAGGTGCAGGGCTCTGATCATCCATCTCCTCCTCTGGT
ACCTGCCCGGGCGGNCCGCTCTAGAACTAGTGGGATCCCCCGGG

| | |
|---|---|
| Sequence 420 | cMhvSC031g07a1 |

CCGCGGTGGCGGCCCGGGACCGAGGGTTTGGTGCACCTCGATTTGGAGGAAGTAGGGCAGGGCCC
TTATCTGGAAAGAAGTTTGGAAACCCTGGGGAGAAATTAGTTAAAAAGAAGTGGAATCTTGATGA
GCTGCCTAAATTTGAGAAGAATTTTTATCAAGAGCACCCTGATTTGGCTAGGCGCACAGCACAAGA
GGTGGAAACATACAGAAGAAGCAAGGAAATTACAGTTAGAGGTCACAACTGCCCGAAGCCAGTTC
TAAACAATTATTTTTACTAAAATGCATAATTATGTGATAGTTATACATATACCAACCTGTTATGTGA
GACAAGCTGACCTGCAAGTAGTCCAAGGCCAGTGAATCAATTACTGCTTGTACCT

| | |
|---|---|
| Sequence 421 | cMhvSC031c09a1 |

CGCGGTGGCGGCNCGGGACCGAGGGTTTGGTGCACCTCGATTTGGAGGAAGTAGGGCAGGGCCCT
TATCTGGAAAGAAGTTTGGAAACCCTGGGGAGAAATTAGTTAAAAAGAAGTGGAATCTTGATGAG
CTGCCTAAATTTGAGAAGAATTTTTATCAAGAGCACCCTGATTTGGCTAGGCGCACAGCACAAGAG
GTGGAAACATACANAAGAAGCAAGGAAATTCAGTTATGAGGTCACAACTGCCCGAAGCCAGTTCT
AAACAATTATTTTTACTAAAATGCATAATTATGTGATAGTTATACATATACCAACCTGTTATGTGA
GACAAGCTGACCTGCAAGTAGTCCAAGGCCAGTGAATCAATTACTGCTTGTACCTCGGC

| | |
|---|---|
| Sequence 422 | cMhvSC031b07a1 |

CCGCGGTGGCGGCCCGCCCGGGCAGGTACTGTCCAACTGGATGCTGCCCTGGTGGCTGAAGGCAC
ACTTCATGATGCTGTCCAGGGTCATCAGGGAGACATGTTGAAAGAGCTCCAGACGTGAGTTTTGGG
CAATGTGTTCCTCCCATTTGTTCAGCATCATCCGAACACTCTTAGACATCATGGTGATGAATATTTT
CAGAATGCTGATGTTGAAGCCAGGTTTCACAATCTGGCGGTGCTTTTTCCATTTAGAACCATCCAG
GGTCACAAGTCCTCGACCAACCCAGGATTCAAGGATTTTGTGGCTAACAGCACTTTTGGGATCTTG
TCTTTTCAGGAGAATCTTGACATAGTCTGGGTCATGGATATTGAAAGAACATCGTAAAGGGTCCAA
CCCACAAGGGAACGGCACATGGGTATTTTTCCATCAGCTCAGGATACACCTNAAACTCTTTTACTG
GGTAAGACTCCTTGGGGCCATAAACCAGTGCGCAGGGGGGTGCAGGGAAACCAGGTGCATGGCTT
CTGANCGGCCATCTCCTCCTCTGGTACCTTCGGGGCGCTTCTAGAACTAGTGGGATCCCCCGG

| | |
|---|---|
| Sequence 423 | cMhvSC031a08a1 |

GCAGGTACAGCCTGGGCTCCAGAGTCAGCCTCTACACTCACCAGACTATGGCGGATTCATCATTAT
ACTGGGAAGCNACAGCCTGGGCCCCANAGTTGGTCATCCGTNCATGCACAGATGAGGAGAGGTCT
CAGGANGCTTTGGCCGTGGTCTGGGACCTTACCTCTTTGTGTAATGAGTTGTTTGGTGTGAGGCCC
AGATNACAAGGGCCCCCNCNTACCTCGNN

| | |
|---|---|
| Sequence 424 | cMhvSC026c02a1 |

TAGGGCGAATTGGAGCTCCCCGCGGTGGCGGCCCGAGGTACTGCCTGGAGCACGACATCCAGCCC
AGTGGCACCATGCCCAGCCACAAGGCCCTGGGGAGCAGTGATAACTCCTTCAACACCTTCTTCAGG
GAGACCCAGCCTGGCAGGCATGTGTCCTGGGCTGTCTGTGGACCTGGAGCCTGCTGTCATAGGTTG
GCATCAACTACCAGTCCCCCACAGTGGTGCCCGGGGGTGCTGTAGCCAAGGTGCAGCGGGCAGTC
TGCGTGCTAAACAATACCACAGCCATCACTGAGGCCTGGGCCCGCCTCAACCAAAAGTTTGACCTG
ATGTATGCCAAGCGGGCATTTATGCACTGTTATGTGGACAGGGGCATGGAGGAAGGTGTCGAGCG
GCCGCCGGGCAGGTACTACAGCCTGGGTGACTGAGTGAGGCTCTTTCTCAAAAAAAAAAAAAAAA
AGAAAAAAG

| | |
|---|---|
| Sequence 425 | cMhvSC023f07a1 |

CCGCGGTGGCGGCCCGCCCGGGCAGGTACCAGAGGAGGAGATGGACGATCAGAGCCATGCACCT
GTTTCCTGCACCCCCTGCGCACTGGTTCTATGGCCACAAGGAGTCTTACCCAGTAAAAGAGTTTGA
GGTGTATCCTGAGCTGATGGAAAATACCTATGTGCCGTTCCCTTGTGGGTTGGACCCTTTACGATG
TTCTTCAATATCCATGACCCAGACTATGTCAAGATTCTCCTGAAAAGACAAGATCCCAAAAGTGCT
GTTAGCCACAAAATCCTTGAATCCTGGGTTGGTCGAGGACTTGTGACCCTGGATGGTTCTAAATGG
AAAAAGCACCGCCAGATTGTGAAACCTGGCTTCAACATCAGCATTCTGAAAATATTCATCACCATG
ATGTCTAAGAGTGTTCGGATGATGCTGAACAAATGGGAGGAACACATTGCCCAAAACTCACGTCT
GGAGCTCTTTCAACATGTCTCCCTGATGACCCTGGACAGCATCATGAAAGTGTGCCTTNAGCCACC
AGGGCAGCATNCAGTTGGACAGTACCTT

| | |
|---|---|
| Sequence 426 | cMhvSC023c06a1 |

GACTACTATAGGGCGAAATTGGAGCTCCCCGCGGTGGCGGCCCGAGGTACAGGACATTCCTCTGC
TCCTATTGCCCCTGTTTCCGTTCTTTTCACACTGTCTGTGGGTGCTGTGCCCTGTTGGAACTCTCTTT
AACGTCTTACGTTGGAGCCGCTAACCTTCCCCAGGTGTTTGTCTTCATTGCTTTCACAGGGAAAGA
ATTACTCGTCCCACTGACGAGTTCTATGTATGTCCCTGGGAAGCTGCATGATGTGGAACACGTGCT
CATCGATGTGGGAACTGGGTACCTGCCCGGGCGGCCGAGGTACGCGGGAATGAGGCCATTGCTGA
ACTTGATCACTGAATGAAGACTCATACAAAGACAGCACCCTCATCATGCAGTTGCTTAGAGACAA
CCTAACACTTTGGACATCAGACAGTGCANGAGAAAGAATGTGATGCGGCAGAAGGGGCTGAAAA
CTAAAATCCATACAGGGTGTCATCCTTCTTTCCTTTAAAGAAACCTTTTTACACAATCTTCCATTC

| | |
|---|---|
| Sequence 427 | cMhvSC025f05a1 |

GACACGGCTTCCTGGGCGGTCCCCTCCACCTGTTGCTTCAGGTCCTGCAAGCCCTTGCTTGCCATGG
CTTCGGGGTATCTGTGGAGTCGTCAAGAGCAGCTGGAGCGACGTTGGATCCTGCCCAGAGTGGCC
CCCGCGTACCTCGGCCGCCCGGGCAGGTACAAGCTTACAAAACTCAGACCACTCACCAGAAAAAA
ATCGGCATTTATATAGTTGTGTTACTTTTGGTTTCCTGCATCTTTTCACATCTGGCTCATTTACATCA
TTTTCTTCATCTTCCAAAGTGGAGTTAGCTACTACATTAGGTAAGGTTACTTCATCAATCACCATAC
TGTTATAATCTTGAAAGTGAATTTCTTTGGACCCTCCCTTGAATGCAGTTATACCTAGTAAACCTGA
TCCACAACCAAGATCCAAGACTTTTTTCCCAGCAAATTTCACTTTGGCCTTTGTGAAATAAAGCCA
GGAGGGNAAAAGGGTCCT

| | |
|---|---|
| Sequence 428 | cMhvSC025a04a1 |

CGGGCAGGTACAAGCAGTAATTGATTCACTGGCCTTGGACTACTTGCAGGTCAGCTTGTCTCACAT
AACAGGTTGGTATATGTATAACTATCACATAATTATGCATTTTAGTAAAAATAATTGTTTAGAACT
GGCTTCGGGCAGTTGTGACCTCTAACTGTAATTTCCTTGCTTCTTCTGTATGTTTCCACCTCTTGTGC
TGTGCGCCTAGCCAAATCAGGGTGCTCTTGATAAAAATTCTTCTCAAATTTAGGCAGCTCATCAAG
ATTCCACTTCTTTTTAACTAATTTCTCCCCAGGGTTTCCAAACTTCTTTCCAGATAAGGGCCCTGCC
CTACTTCCTCCAAATCGAGGTGCACCAAACCCTCGGTCC

| | |
|---|---|
| Sequence 429 | cMhvSC034e05a1 |

ATAGGGCGAATNGGAGCTCCCCGCGGTGGCGGCCGAGGTACGCGGGAAGATCTACACTATTATGT
CACCCCAGAAAGTGAACTCTCAGTCTTCCCAGCCAGTCTCTTTCTTATCATAGGTTAGCTTGCTTAT
TCTGGAATTTCGCGTATACAGATGCATGCCATGCCATAGGTACCTGCCCG

| | |
|---|---|
| Sequence 430 | cMhvSC030g10a1 |

CCGCGGTGGCGGCCGAGGTACACCGACTACGGCGGACTAATCTTCAACTCCTACATACTTCCCCCA
TTATTCCTAGAACCAGGCGACCTGCGACTCCTTGACGTTGACAATCGAGTAGTACCTGCCCGGGCG
GCCGCCCGGGCAGGTACTCTTGCTGCTTGGTTGATTAATAAAGCGGGACGTCCCTTTGAGCAGCCT
CAAGAATATGATGACCCTAATGCAACAATATCTAACATACTATCCGAGCTTCGGTCATTTGGAAGA
ACTGCAGATTTTCCTCCTTCAAAATTAAAGTCAGGTTATGGAGAACATGTATGCTATGTTCTTGATT
GCTTCGCTGAAGAAGCATTGAAATATATTGGTTTCACCTGGAAAAGGCCAATATACCCAGTAGAA
GAATTAGAAGAAGAAAGCGTTGCAGAAGATGATGCAGAATTAACATTAAATAAAGTGGATGAAG
AATTTGTGGAAGAAGAGACAGATNATGAAGAAAACTTTATTGATCTCAACGTTTTTA

| | |
|---|---|
| Sequence 431 | cMhvSC022e05a1 |

TCGAGCGGCCGCCCGGGCAGGTACCCTTGCTGATGTGGGTCTTCAGCTCCTCTTCTGAATACTCCA
CCTTGGGCCTTTTGTTCCAGAACCTTCATTATCGTGTTTTCTCTTGGTAACTTTCCCTTCAGGATTGT
AATCTGGTGGGTAAACAAGCTCCTTAAACTCATCCACCAAGGAGCCCAGTCTTTTATTCATTGCTT
CAACCTTGGGCAATGTCAGGTCCACTGCTTGTTCCGGCTCCATCAAATCCAAGGCCAAGGCCTCCA
GGTTCCTGAAGTGCTGCTGCAGCACGGGGTTCTCAAAGCTGTCACTTCTGTACCTCGGCCGAGGTA
CAAACTCGCATTCATGGCTTGGTTTCCCAGAAGATCTCCATTTAACTTTTTTAAAGAAAGTTTATTG
CTTTCTTTAACCTGCATTTTTTCTAAGTTTTTTTTCACATAAAGGTGCTGTCTTTGTGGCAAGGCCTA
NGCATGACAATCGGAGGACTCGAGGGGGAT

| | |
|---|---|
| Sequence 432 | cMhvSC022d03a1 |

CCGCGGTGGCGGCCGTTAAGGACAGTTGTGGCAAAGGAGAAATGGTCACAGGGAATGGGCGGCG
GCTCCACCTGGGGATTCCTGAGGCCGTGTTTGTGGAAGATGTAGATTCCTTCATGAAACAGCCTGG
GAATGAGACTGCAGATCAGTATTAAAGAAGCTGGATGAACAGTACCTCGGCCGGCTGTTATGTTC
ATCATGGCACTTAAGAGATGCTTAACAAACCTTTCCTACAATGTTCCTCAGATTTTCAGAGCTTATT
TGATCTAGCATCTGGTTCCTAAATTCTGAGTCACATCAGAAGCCAAACTTGAATGCTTTTGGAAAG
AGCTAGCCTCATACCACTTCAGTTGGGAAGGGGAGTACCT

| | |
|---|---|
| Sequence 433 | cMhvSC027c04a1 |

GGAGCTCCCCCGCGGTGGCGGCCGAGGTACTGTCCAACTGGATGCTGCCCTGGTGGCTGAAGGCA
CACTTCATGATGCTGTCCAGGGTCATCAGGGAGACATGTTGAAAGAGCTCCAGACGTGAGTTTTGG
GCAATGTGTTCCTCCCATTTGTTCAACATCATCCGAACACTCTCAGACATCATGGTGATGAATATTT
TCAGAATGCTGATGTTGAAGCCAGGTTTCACAATCTGGCGGTGCTTTTTCCATTTAGAACCATCCA
GGGTCACAAGTCCTCGACCAACCCGGGATTCAAGGATTTTGTGGCTAACAGCCTTTTGGGATCTTG
TCTTTTCANGAGAATCTTGGCATTANTTTGGGTCATGGGACACTGAANAACATCGTTNAGGNTTCA
NCCCACAGCGGGAAACAGCACATGGGTATTTTTNCATCAGCTTATGATACACCTTCAAACTNCTTT
ACTGGGTAAAACC

| | |
|---|---|
| Sequence 434 | cMhvSC027e11a1 |

CCGCGGTGGCGGCCGAGGTACCAAAAAGACTCTCAAAAACCAATACTCCCACGGGCAAGGGAATA
GCCAAGTTTGTTGCGGTTTCCAATGAATGACATCAGCCCTGTGTAGGTCTCAATCAAAATGGGTTC
AGTTAACACCATCAGTTTTTTCCTCTTCCAGATCCAGTTGAATTCTTGTGGGCATTCTGGATAGCTG
GAACAAGCTTAGACATGAACCCAGACAACTTGCAAATTTCAAGGAATTTCTCACTGGTGTATTTCA
TAGGATGCTCAGTGAAAGTAGCATAAGGAACTTCAGTGGACCATGGGTTCCAGCGGGACAGAAGA
GGCTGCTCCTCCGGACTCCCCCAGTAGATCCTAAGGCCTTCTCCTTGTCTCTTGTCCAGGGACATCC
CAGGGAAGGTGAACTTGCCCAGGCAGATGCGATAGACAGCGCTCAGAGGAATCCGCTTGCAGCTG
CACACAACTCAGCATGATGAAGTCGTATTTGCAGATCAAGGAGAAGTCTTGTTGTGACCAGTAAG
AATTCTCTCCTTCTCATTGNTCCAGTGGGTCTATCTTTGTCAAGAGCCAGAAGCCTTGAATGGTCTT
TTCAGAAGTCTTAACTTCCGTGACCTTTCAAGTCTTTCATGGCAGTCTTAATGGGCCCCCNGGCCGN
TCTAGAACTAGTGGGATCCCCCGGGCTGCAAGGAATTTNATTACAAAGCTTATCGATNCCGGCNA
ACCTCNAGGGGGGGC

| | |
|---|---|
| Sequence 435 | cMhvSC027e09a1 |

CGCGGTGGCGGCCCGCCCGGGCAGGTACAGGGCAGTAATTGATTCACTGGCCTTGGACTACTTGC
AGGTCAGCTTGTCTCACATAACAGGTTGGTATATGTATAACTATCACATAATTATGCATTTTAGTA
AAAATAATTGTTTAGAACTGGCTTCGGGCAGTTGTGACCTCTAACTGTAATTTCCTTGCTTCTTCTG
TATGTTTCCACCTCTTGTGCTGTGCGCCTAGCCAAATCAGGGTGCTCTTGATAAAAATTCTTCTCAA
ATTTAGGCAGCTCATCAAGATTCCACTTCTTTTTAACTAATTTCTCCCCAGGGTTTCCAAACTTCTTT
CCAGATAAGGGCCCTGCCCTACTTCCTCCAAATCGAGGTGCACCAAACCCTCGGTCC

| | |
|---|---|
| Sequence 436 | cMhvSC037e10a1 |

CCGCGGTGGCGGCCGAGGTACTGTCCAACTGGATGCTGCCCTGGTGGCTGAAGGCACACTTCATG
ATGCTGTCCAGGGTCATCAGGGAGACATGTTGAAAGAGCTCCAGACGTGAGTTTTGGGCAATGTG
TTCCTCCCATTTGTTCAGCATCATCCGAACACTCTTAGACATCATGGTGATGAATATTTTCAGAATG
CTGATGTTGAAGCCAGGTTTCACAATCTGGCGGTGCTTTTTCCATTTAGAACCATCCANGGTCACA
AGTCCTCGACCAACCCANGATTCAAGGATTTTGTGGCTAACAGCACTTTTGGGATCTTGTCTTTTCA
GGAGAATCTTGACATAGTCTGGGTCATGGATATTGAAGAACATCGTAAAGGGTCCAACCCACAAG
GGAACGGCACATAGGTATTTTTCCAT

| | |
|---|---|
| Sequence 437 | cMhvSC037f08a1 |

CGGCCCGAGGTTATCGTTAGGCATCTCCCANGCGACCGGCTCCGCAGCAAGATGGCGGACGAGAA
GGACAGGGAAGAGATAATAGTAGCAGAATTTCACAAAAAAATCAAAGAGGCATTTGAAGTCTTTG
ACCATGAGTCGAATAATACAGTGGATGTGAGGGAGATTGGAACAATTATCAGGTCATTAGGATGC
TGTCCTACGGAAGGAGAGCTGCATGATCTGATTGCAGAGGTAGAGGAAGAAAGAACCTACTGGAT
ACATTCCGATTCGAAAAATTTCTTCCCGTGATGACAGAAATACTACTAGAAAGAAAATACAGACC
AATTCCAGAAAGATGTCCTTCTTCNAGCTTTTGAGGTTTTAGATTCAACTAAACCTGGGTTTCTTAC
TAAGGGCCGAGCTGATCAAGTATATGACTGAAGAAGATGGAGTTTCNCTCCCTCGCCCAGCTGAA
ATGCCAGTGGCGTGATCTTGGCTCGTTGCAACCCTCACCCTCCCGGTTCAAGCCATTCTTCCTGCCT
NAANCCTTCTGAGCAACTGGGATTGGNAGGCCACACCCAACACNCCTGGCTAAATTTCTGTATTTT
TNGGGANAA

| | |
|---|---|
| Sequence 438 | cMhvSC037e07a1 |

CGTGGCCCGTGGCTCACGTGGCCCCTAAGTTTCCGGGTCTTCCTCAGTCTGGATGGCATGTTGGCA
GCCCAGACGAAAAAGCCCCGCGTACCTNGGCCGNNNAAANNTTNTNNATCCTCCGGGCTG

| | |
|---|---|
| Sequence 439 | cMhvSC038b12a1 |

CCGCGGTGGCGGCCGTTAAACATGTGTCACTGGGCAGGCGGTGCCTCTAATACAGGTGATGCTAG
AGGTGATGTTTTTGGTAAACAGGCGGGGTAAGATTTGCCGAGTTCCTTTTACTTTTTTTAACCCTTC
CTTCCCGCGTACCT

| | |
|---|---|
| Sequence 440 | cMhvSC038b12a1 |

AGGAATTTCGATATCCAAGCTTATCGAATACCCGTCGACCTCGAG

| | |
|---|---|
| Sequence 441 | cMhvSC038g09a1 |

ANCACTACTTAGGGCGAATTGGAGCTCCCCGCGGTGGCGGCCGAGGTACGCGGGGACCTCATTCA
TTTCTACCGGTCTCTAGTAGTGCAGCTTCGGCTGGTGTCATCGGTGTCCTTCCTCCGCTGCCGCCCC
CGCAAGGCTTCGCCGTCATCGAGGCCATTTCCAGCGACTTGTCGCACGCTTTTCTATATACTTCGTT
CCCCGGCAAACCGCAACCCATTTGACGCCAATGTCGGGGTTATTCCGAGTTGACCGAAGACCGCG
GC

| | |
|---|---|
| Sequence 442 | cMhvSC038a03a1 |

CCGCGGTGGCGGCCGCCATGGAGCAGCCGCCGGCGCCTAAGAGTAAACTAAAAAAGCTGAGTGA
AGACAGTTTGACTAAGCAGCCTGAAGAAGTTTTTGATGTATTAGAGAAGCTTGGAGAAGGGTCTT
ATGGAAGTGTATTTAAAGCAATACACAAGGAATCCGGTCAAGTTGTCCNCAATTTAANCAAAGTC
CCTTGGGCCGCTCTTAGAAACTAGTGGGATCCCCCGGGCTGCAG

| | |
|---|---|
| Sequence 443 | cMhvSC038d02a1 |

CCGCGGTGGCGGCCGAGGTACACGTCTCTGTCTGGGCCTCGGCCAGGGTGCCGAGGGCCAGCATG
GACACCAGGACCAGGGCGCAGATCACCTTGTTCTCCATGGTGGCCATTGCCTCCTCTCTGCTCCAA
AGGCGACCCCGAGTCAGGGATCCCCGCGTACCTGCCCGGGCGGCCNGTTNNAAAAACTANTGGAT
CCCCCGGGCNTGCAGGA

| | |
|---|---|
| Sequence 444 | cMhvSC039b01a1 |

CCGGGCAGGTACGCGGGGAGGCCGTAGGAGGAAGATGGCGGTGGAGTCGCGCGTTACCCAGGAG
GAAATTAAGAAGGAGCCAGAGAAACCGATCGACCGCGAGAAGACATGCCCACTGTTGCTACGGGT
CTTCACCACCAATAACGGCCGCTCTNGAACTNGTTGGATCCCCCGGGCCTGCANGGAATTC

| | |
|---|---|
| Sequence 445 | cMhvSC038h11a1 |

CTTAGGGCGAATTGGAGCTCCCCGCGGTGGCGGCCGTGCATCATCATGGAGTTAGTGAGGCGCTCC
ACAATGGGACACTGAGCTTTGCGGAAGCGTTTGGCGGCATACCGCCCTGCACTGTGAGGCAGGTA
CCTGCCCG

| | |
|---|---|
| Sequence 446 | cMhvSC038h11a1 |

TATTTNAATNNCCCGTCCACCCTTCGAGGGGGGGGGGNCCGGGTACCCAGC

| | |
|---|---|
| Sequence 447 | cMhvSC038h11a1 |

ATTGCNCGCTTGGGCGTAAATCATGGGTCAT

| | |
|---|---|
| Sequence 448 | cMhvSC038h11a1 |

CGCTCCACAAATTTCCACACCAACATACCGAANCCGGGGGAGCCANTAAAAAGTTNTTAAAAGCC
CTGGG

| | |
|---|---|
| Sequence 449 | cMhvSC038d08a1 |

ACTATAGGGCGAATTGGAGCTCNCCGCGGTGGCGGCCGCCCGGGCAGGTACCCAATAGTGGATGG
GAAGCTTTCCATCCAGTGCTACTTGCGGGCCTTGGATCGATGTTACACATCATACCGTAAAAAAAT
CCAGAATCAGTGGAAGCAAGCTGGCAGCGATCGACCCTTCACCCTTGACGATTTACAGTACCTCGG
CCGCTNTTAAAACTAGTTGNATNCCCCCGGGCCTGCANGGAATTCCGATATCAAAGCTTTATCGAT
ACCGTC

| | |
|---|---|
| Sequence 450 | cMhvSC038g06a1 |

CGACTNCTTAGGGCGAATTGGAGCTCCCCGCCGTGGCGGCCGCCCGGGCAGGTGCTGTGAGTGCT
CTGGCGAAGTTTGGAGCCCAGAATGAAGAGATGTTACCCAGTATCTTGGNGTTGCTGAAGAGGTG
TGTGATGGATGATNNNNATGAANTAAGGGACCGAGCCACCTTCCACCTAAATGTCCTGGAGCAGA
AGCAGAAAGCCCCNTTAATTCNAGGCTTNTATCCTAAAATGGTCTGACTGTTGTCCATCCCTGGTC
TGGAGAGGACTCTGCAGCAGTACCTNGGCCGCCCGGGCAGGTACAAAATGATTTCCCAAAGTTCT
TGAAGTGCCTTGAGAACATGTGGGTCCGAGTTGTTATAACAGACTCNTCCCCCGGGTCACCTTTTG
CCTGGTCATNCTGTTAGAGTACCTTTGGCCGNTCTANAACTAGTGGGATCCCCCGG

| | |
|---|---|
| Sequence 451 | cMhvSC038g05a1 |

CGACTACTTAGGGCGAATTGGAGCTCCCCGCGGTGGCGGCCGAGGTACGCGGGGAGGAGGTCGAG
AGTCGTTCTTCTCTTTGCACAGACGTGACTCTGCAGCTCTTTAACGGNGCCCGCTGCTCTCAACCCA
GCTTACCCCACTTTNTCCNATGGC

| | |
|---|---|
| Sequence 452 | cMhvSC038g05a1 |

TTNAAACTTTNTTCNATACCCGTCCGACCTCGA

| | |
|---|---|
| Sequence 453 | cMhvSC038g05a1 |

ATTTGTTTATCCCGCTCACAATTCCACACAAACAATACCGAAGCCCGGGGAAGCCATAAAAAGTGT
AAAGGCCTTGGGGGTGCCTAATGGAGTGAGCTTAACTCACATTAATTGCGTTGCCGCTCACTGCC

| | |
|---|---|
| Sequence 454 | cMhvSC038f05a1 |

AGGTACCTTCTGGGGCATACAACGTGGCAGCAGGGCCTCGGGAAGAGGGGTAGGAGGACCGAGC
AGCAANNGNGTGTCTTAGGAAGACAGGAAAAAAAAACCCTTTTGNCACACATGCNNGGAGGGTT
GTCCCTGAAAAGAAGGGCAGGTTGGGANAGGTNCCCCTNGTNNCNTTTAANAAAAAAAGGCCCCC
CAGGTGGGCCAAAANAAGCCACCNANTTNAAANGTAGGGGAATTGAATCNATATAAAAAAAAAC
AAAATCNACCGCCCANAAANTANANGGGAACCAAAATTCAATCCTTTTCCACCGGGTTTTCNTTTT
CCCAACCCAAGAAAAA

| | |
|---|---|
| Sequence 455 | cMhvSC021g12a1 |

AATTGGAGCTCCCCGCGGTGGCGGCCGGGACCGAGGGTTTGGTGCACCTCGATTTGGAGGAAGTA
GGGCAGGGCCCTTATCTGGAAAGAAGTTTGGAAACCCTGGGGAGAAATTAGTTAAAAAGAAGTGG
AATCTTGATGAGCTGCCTAAATTTGAGAAGAATTTTTATCAAGAGCACCCTGATTTGGCTAGGCGC
ACAGCACAAGAGGTGGAAACATACAGAAGAAGCAAGGAAATTACAGTTAGAGGTCACAACTGCC
CGAAGCCAGTTCTAAACAATTATTTTTACTAAAATGCATAATTATGTGATAGTTATACATATACCA
ACCTGTTATGTGAGACAAGCTGACCTGCAAGTAGTCCAANGCCAGTGAATCAATTACTGCTTGTCC
TCGGCCGCTCTAGAACTAAGTGGATC

| | |
|---|---|
| Sequence 456 | cMhvSC021f11a1 |

CGAATTGGAGCTCCACCCGCGGTGGCGGCCCGCCCGCCATGGGACCACGTGGGGTAAGTTGGGTT
GAGAGCAGCGGGCGCCGTTAAAGAGCTGCAGAGTCACGTCTGTGCAAAGAGAAGAACGACTCTCG
ACCTCCTCCCCGCGTACCTCGGCCGCTCTAGAACTAGTG

| | |
|---|---|
| Sequence 457 | cMhvSC021f08a1 |

CGCCCGGGCAGGTACAGCCTGGGCTCCAGAGTCAGCCTCTACACTCACCAGACTATGGCGGATTC
ATCATTATACTGGGAAGCAACAGCCTGGGCCCCAGAGTTGGTCATCCGTCCATGCACAGATGAGG
AGAGGTCTCAGGAAGCTTTGGCGTGGTCTGGGACCTTACCTCTTTGTGTAATGAGTTGTTTGGTGT
GAGGCCCGGTCACAAGGGCCCCCGCGTACCT

| | |
|---|---|
| Sequence 458 | cMhvSC021a08a1 |

CGCGGTGGCGGCCCGCCCGGGCAGGTACACTGCCAAACCCGCAGAAGTGCCCAGGGAAAGCCCCG
CGGGGGCTGCGGATAGTCACGGCTGATGGAAAGCTGACAGCGGAACAAGGACGCAACGTCACTCT
CATGGTGCAATTAGAAGAGGGTGATGTTCAGCCGGACACTCATCCAAGTGGACTTTGGCGATGGT
ATCGCGGTGTCTTACGTCAATCTCAGCTCCATGGAAGATGGGATCAAACACGTNTATCAGAACGTG
GGCATTTTCCGTGTGACCGTGCAGGTGGACAACAGTCTGGGTTCTGACAGCGCCGTNCTGTACCTT
CGGC

| | |
|---|---|
| Sequence 459 | cMhvSC021a08a1 |

TGATATCAAGCTTATCGATACCGGTCNACCTCTAGGGGGGGCCCNGGNCCCAACTTTTTGTTCCCT
TTAG

| | |
|---|---|
| Sequence 460 | cMhvSC021f07a1 |

TTAGGCGAATGGACTCCACGCGGTGGCGGCCGTCCGGGCAGGTACCAGGATGTCCAGTGCGACCA
TCTTTTCCAGCAGGGCCAGANGGACCAGCAGGGCCCCTAGGACCAGCAGGACCCACGGAGCCAGG
AGCACCTT

| | |
|---|---|
| Sequence 461 | cMhvSC021f07a1 |

GAATGCCTTGTGGGCCACTAGGACCTCTTGGGCCAACCCCGCGTACCT

| | |
|---|---|
| Sequence 462 | cMhvSC017a08a2 |

CGAATTGGAGCTCCCCGCGGTGGCGGCCGCCCGGGCAGGTACCTGCGGAGGCAGCGGCTGCTGCG
GGACCTGCGCCCCTTCCCAGCGCCCCCCACCCACTGGTTCCTTGGGCACCAGAAGTTTATTCAGGA
TGATAACATGGAGAAGCTTGAGGAAATTATTGAAAAATACCCTCGTGCCTTCCCTTTCTGGATTGG
GCCCTTTCAGGCATTTTTCTGTATCTATGACCCAGACTATGCAAAGACACTTCTGAGCAGAACAGA
TCCCAAGTCCCAGTACCT

| | |
|---|---|
| Sequence 463 | cMhvSC018f05a2 |

GGCGAATTGGAGCTCCCCGCGGTGGCGGCCGCCGGGCAGGTACTTTACTGCACCCAGCAGACTTTC
AACAACTCATTGATCCAAAGATACATGCACAGTCTGAGCACCAGCTATGGTGCTCATAACTTCTTT
AAGACTTGAACCCTTTCAATCTGTGTGATTCATTAAATTGGACCATTGATGATAAGAATACACATT
GTATGTTTCTGTGCACATGACAGTGTGTGTGTGTGCACGTACCT

| | |
|---|---|
| Sequence 464 | cMhvSC018d07a2 |

AGGTACTGGCAAAAAAAATATGCTCGGTGGTTCCAGCANAAGCCAGGCCAGGCCCCTGTTCTGGT
GATTTATAAAGACGGTGAGCGGCCCTCAGGGATCCCTGANCGATTCTCCGGCTCCAGTTCACGGAC
CACAGTCACCTTGACCATCAGCGGGGCCCACCTTGAGGATGAGGCTGACTATTACTGTTACTCTAC
GACTGACAACAATGGGGTGTTCGGCGGAGGGACCAAGCTGACCGTCCTACGTCAGCCCAAGGCTG
CCCCCTCGGTCACTCTGTTCCCGCCCTCCTCTGAGGAGCTTCAAGCCAACAAGGCCACACTGGTGT
GTNTCATAAGTGACTTCTACCCGGGAACCGTGACAGTGGCCTGGAAGGCAGATAGCANCCCCGTC
AAGGCGGGAGTGGAGACCACCACACCCTCCAAACAAAGCAACAACANGTACCTGCCCG

| | |
|---|---|
| Sequence 465 | cMhvSC018c08a2 |

ACATGGATGGCTCTCAAGACAGCCCTATCTTTATGTATGCCCCTGAGTTCAAGTTCATGCCACCAC
CGACTTATACTGAGGTGAGGATTGTCATCTTTACTGTTAAATTTGTCCTAAGCTTTCTATAAGAAGT
TGACTTAGACGGATTGCTAAACTGGTTTGTTCTTTTTGTTCTTACCTGAACTGAAATAGTCTGTTTC
TTTCTTTAGGTGGATCCCTGCATCCTCAACAACAATGTGCAGTGAGCATGTGGAANAAAAGAANC
AGCTTTACCTACTTGTTTCTTTTTGTCTCTCTTCCTGGACACTCACTTTTTCAGAGACTCAACAGTCT
CTGCAATGGAGTGTGGGTCCACCTTAGCCTCTGACTTCCTAATGTAGGAGGTGGTCANCANGCAAT
CTCNTGGGCCTTAAA

| | |
|---|---|
| Sequence 466 | cMhvSC036d11a2 |

GCGCGTAATACGACTACTATAGGGCGANTTGAANNTNNANNCGGCCGAGGNACCTTGATCTCCTG
GCGGNGGCTCGTCCCTGGTCTTAGTTCCACCGGGCNGCGGGAGTCAGGACCGCCTGTCCTCAGACC
CCTCCGCAGCGACT

| | |
|---|---|
| Sequence 467 | cMhvSC019a09a3 |

CCGCGGTGGCGGCCGAGGTACTTTTTTTTTTTTTTTTTTTTTTTTTATTTTTTTTTTTTTTTTTTTTTTT
TTTTTTGCTCTAAAGGGGGTAGAGGGGGNGCTNTAGGGTAAATACNGGCCCTATTTCAAANATTTT
TAGGGGAATTAATTTTAGGACNATGGGCATNAAACTGNGGTTTGCTCCACAAATTTCAAANCATTN
TCGAGCGGCCNCCCGGGCAGGTACTTNNTTTTTTTTTTTTTTTTNGGNGGNAATNTTGNTTTGTNNC
CCAAGCTGGAGTGCANTGGCATGGTNTTTGGTTAANTGCAACCTTCACCTTTCCTAGTTTAAAGCN
ATTTTNTNCTGCCTNANNCCTCCCCTAANNAGCTTGGNGATTACAGGNAANATGCCCCCCAATAGC
CNGGGNAAAATTTTTTGGAATTTTTAGCAAAAAAANAAGGGTTTTTCNCCATTGCTTGGCCCANGG
CTTANNNTTTAAAAANTTNCCTGNCCCTTTAAAGNGGAATCTTGGNCCNCCNTTTGGGNCCGTTTT
TTAAAAAANTNGNTNGGAATTCCCCCCCGGGGCTTTGGAGGGAAAATTTTNAATTTTNCAAANCCT
TTATTTTAATTCCCNGNCNNANCCTTTGAGGGGGGGGGGGC

| | |
|---|---|
| Sequence 468 | cMhvSC020b11a3 |

AGGTACTGTCCAACTGGATGCTGCCCTGGTGGCTGAAGGCACACTTCATGATGCTGTCCAGGGTCA
TCAGGGAGACATGTTGAAAGAGCTCCAGACGTGAGTTTTGGGCAATGTGTTCCTCCCATTTGTTCA
GCACCATCCGAACACTCTCAGACATCATGGTGATGAATATTTTCAGAATGCTGATGTTGAAGCCAG
GTTTCACAATCTGGCGGTGCTTTTTCCATTTAGAACCATCCAGGGTCACAAGTCCTCGACCAACCC
AGGATTCAAGGATTTTGTGGCTAACAGCACTTTTGGGATCTTGTCTTTTCAGGAGAATCTTGGCAT
AGTCTGGGTCATGGACACTGAAGAACATCGTAAAGGGTCCAACCCACAAGGGAACAGCACATGGG
TATTTTTCCATCGGCTTATGATACACCTCAAACTCCTTTACTGGGTAAAACTCCTTGTGGCCATAGA
ACCAGTGGGCAGGGGGTGCAGGAAACAGGTGCAGGGCTCTGATCATCCATCTCCTCCTCTGGTAC
CTGCCCGGGCCGGCCGCTCGAAGGTACGCGGGTGAAGAAAAGGCTCTAACATGAGTTTGATCTTG
AGCCCCAATGTTGAACAAGCTTCCAGACCTTTACAATTTTAA

| | |
|---|---|
| Sequence 469 | cMhvSC029b09a2 |

TTGAGGAGAGACACATGGGTGGGAAATTGCAATAAAAAGACGGCCCATAGCAANGCTGCATTCCC
ATGGCTGGCCAGAGGAGGAACGCTTTGTGTTCTCATCGGAGCTGCATGGGAAGTCTGCATACAGC
AAAGTGACCTGCATGCCTCACCTTATGGAAAGGATGGTGGGCTCTGGCCTCCTGTGGNTGGCCTTG
GTCTNCTGCATTCTGACCCAGGCATCTGCAGTGCAAGCGAGGTTATGGAAACCCCATTGAAGCCAG
TTCGTATGGGCTGGACCTGGACTGCGGAGCTCCTGGCACCCCANAGGCTCATGTCTGTTTTTGACC
CCTGTCAGAATTACACCCTCCTGGATGAACCCTTCCGAAGCACANTANAACTCAGCAGGGTCCCAT
GGGTGCGATAAAAACATGAGCGGCTGGTACCTGCNCG

| | |
|---|---|
| Sequence 470 | cMhvSC029b09a2 |

NGGAATTTAATATCAAGCTTATNGATACCCGTTCTAACCNTNGGANGGGGGGGGCCCCGGTACC

| | |
|---|---|
| Sequence 471 | cMhvSC020b10a3 |

TGTGGGTGAGTTGGCTGCCGGTGAGTTGGGTGCCGGTGGAGTCGTGTTGGTCCTCAGAATCCCCGC
GTAGCCGCTGCCTCCTCCTACCCTCGCCATGTTTCTTACCCGGCCTGAGTACCTCGGCCGCCCGGGC
AGGTACTGTTTTGAGGAGAAGGATCAGCTATCCAGCGACTGTGAGCATGAACAAGAGCCAAGCCT
AGAGACATAATCATCTTGACCCTCTGAGTTACAGGATTCGGCTTATTTTCTTCTTCTTCTAAAACTC
GGGCAAAATGGCTGAGCTGCCAAATTGGACGACCCTCGCGGCTTTCCCGAGAAAGCTCTAATACC
AAGGACACACAAGCTGGGAAGAAAGTCATGAACACGAAGTANTTGGCAAGAACTGACATGCAGC
CAAAGCAGCACATAATTTCAAGCTGACCGTACCT

| | |
|---|---|
| Sequence 472 | cMhvSC012h12a2 |

CCGGNCAGGTACGCGGGGGCTGTANGCTCAGGAGGCAGAGCTCTGAATGTCTCACCATGGCCTGG
ATCCCTCTCCTGCTCCCCCTCCTCATTCTCTGCACAGTCTCTGTGGCCTCCTATGAGCTGACACAGC
CATCCTCAGTGTCAGTGTCTCCGGGAGAGACAGCCAGGATCACCTGCTCAGGAAATGTACCTCGGC
CGAGGTACGCGGGGGCACTTGGCTTCAAAGCTGGCTCTTGGAAATTGAGCGGAGAGCGACGCGGT
TGTTGTAGCTGCCGCT

| | |
|---|---|
| Sequence 473 | cMhvSC001g01a2 |

AGGTACCTGCAGGCCTCCTACACCTACCTCTCTCTGGGCTTCTATTTCGACCGCGATGATGTGGCTC
TGGAAGGCGTGAGCCACTTCTTCCGCGAACTGGCCGAGGAGAAGCGCGAGGGCTACGAGCGTCTC
CTGAAGATGCAAAACCAGCGTGGCGGCCGCCCGGGCAGGTACTTGTTGTTGCTTTGTTTGGAGGGT
GTGGTGGTCTCCACTCCCGCCTTGACGGGGCTGCTATCTGCCTTCCAGGCCACTGTCACGGCTCCC
GGGTAGAAGTCACTTATGAGACACACCAGTGTGGCCTTGTTGGCTTGAAGCTCCTCAGAGGAGGG
CGGGAACAGAGTGACCGAGGGGGCAGCCTTGGGCTGACCCAGGACGGTCAGCTTGGTCCCTCCGC
CGAATACCACATAAATACCTT

| | |
|---|---|
| Sequence 474 | cMhvSC035h10a2 |

CGGGACCGAGGGTTTGGTGCACCTCGATTTGGAGGAAGTAGGGCAGGGCCCTTATCTGGAAAGAA
GTTTGGAAACCCTGNGGAGAAATTAGTTAAAAAGAAGTGGAATCTTGATGAGCTGCCTAAATTTG
AGAAGAATTTTTATCAAGAGCACCCTGATTTGGCTAGGCGCACAGCACAAGAGGTGGAAACATAC
AGAAGAAGCAAGGAAATTACAGTTAGAGGTCACAACTGCCCGAAGCCAGTTCTAAACAATTATTT
TTACTAAAATGCATAATTATGTGATAGTTATACATATACCAACCTGTTATGTGAGACAAGCTGACC
TGCAAGTAGTCCAAGGCCAGTGAATCAATTACTGCTTGTACCT

| | |
|---|---|
| Sequence 475 | cMhvSC035c03a2 |

CCGCGGTGGCGGCCGCCCGGGCAGGTACTTTACTGCACCCAGCAGACTTTCAACAACTCATTGATC
CAAAGATACATGCACAGTCTGAGCACCAGCTATGGTGCTCATAACTTCTTTAAGACTTGAACCCTT
TCAATCTGTGTGATTCATTAAATTGGACCATTGATGATAAGAATACACATTGTATGTTTCTGTGCAC
ATGACAGTGTGTGTGTGTGCACGTACCT

| | |
|---|---|
| Sequence 476 | cMhvSC001e01 |

CCGGGCAGGTACTANAAGCTGGGGGAAAAAGAGTNGGTNAAACANACATGGCCTTGGCCCTTCTG
GAATTTACATTCTCGTATGTGTCATGAAAGTTGTTTTGAAAAAACCCAAACCATNGTTTTTNCTNTG
CTTTCACACTACAACAATCAACACAGAAGACTTCTGTGACTCCAAAAAATATGTAAGGATTTCTCC
CCACCACCAGGCAAGCAATCAGTTCTGCAGCGGACACCAGTTGGGTGTTCTNCAATTCAATTNCAA
CACTATCTACCTAGAGACAGCATCAGATCCCACAGCATGAGGGCTCAATGCCCAAGCTGCCCCAC
AGCCCCCTGGGCACCAGTAGCAAGTCTGGGCCTCTGGAACTTCTTTTTTTGCAGAGATGGGGTCTC
ACTATATTGCCCAGACTGGGGGCTCA

| | |
|---|---|
| Sequence 477 | cMhvSC006b01 |

CACCGCCGGTGGCCGCCGGCTTGTTATTGCTCATCATGGCACTTAAANAGATGCTTAACAAACCTT
TCCTACAATGTTCCTCAAATTTTCAGAGCNTNNNNGNNGGGAGCATCTGGTNCCNAAAAAAAAAA
TTCTTTTNAAGCCAANCTNGAATGCTTTTGGAAAGAGCTAGCCTCATACCACTTCANTTGGGAAGG
GGGAGTACCTCGNCCCCTCTAAAAACTAATGGGATCCCCCCNGGCCTGCCAANA

| | |
|---|---|
| Sequence 478 | cMhvSC010d11 |

TGATGTATAAAGACAGCGAGCGGCCCTCAGGGATCTNTGAGCGATTCTCCGACTCCAGTTCACGG
ACCACAGTCACCTTGACCATCAGTGGGGCCCACNTTGAGGATGAGGCTGACTATTACTGTTACTGT

| | |
|---|---|
| Sequence 479 | cMhvSC010d11 |

AGCTGTTTCCTGANNCNCTNAAACTNNCNAANGAANGCATTTTTTAAANANCTTNGNTTTTNGGCC
TNNTTAAAACCAATTTAAACNTNTNTGAANTTTTNGGATTTTAA

| | |
|---|---|
| Sequence 480 | cMhvSC010h12 |

TGGAGCTCCCCGCGGTGGCGGCCGAGGTACTTTTTTTTTTTTTTTTTTTTTTAANNCNNTTTTTTTTT
TNTNTTTTTTTTTTTNTTTTTTTTTTTTTTTTTTTNTTTTTTTTTTGTNCCCNANCCNANNANGACNNT
NNNNTTNTTTNTTNANAAAAANNAAAAANAANGCCCNNNNTTATNNNAAAAAAAAAAAANATNT
TTTNTTTNCNCTCCNNCANNNCCNGANGANGNNNGGGNGNTNNCGNGANAAAANAATNNGAGGG
GGNTTNNNCAANAANAAANGTNCCNCCCCTNTTANCANTTTGAANNANGAAAGGGGCNGGATNTT
GGAAGCTGTGAGANNNTCCCCGAGGAACCTCCTGCNNTTTCTTCTCCTGAAGNGCTTATGAAGGG
GCGANCATNNTNCTCCATACATNCNNATTTCNTATAGNGNNCCCAAAGGGACCCACCTTNCTCCCT
NGAAATTTGGCTTAAAGCAACAAATAAAGTTTTTTTTTTGGNGGGGAAGGGAAANGGCTCTTTTTN
CTTGCTGTTTCNAAAATGNGGNGAACCCATTTNATGTTTCTGGGGGGAGGAANNCCCCCCNGGGG
NNAATTNNAANAAAANAAANCCCCCCCNCCGGNNAAAAAAANTANTTNNATNANATANNNNNCC
CNAAAAGGGGGGGGGGGCCCCCCCCCCCTTTTTT

| | |
|---|---|
| Sequence 481 | cMhvSC011h06 |

TGGAGCTCCACCGTGGTGGCGGCCGAGGTACAACGCAGAAGCAGGGTCCTGAGTTGGGAGCCAGT
GGGCCCTGANCANTANCACGAGGCCTGTTGTNTACCAAGTGCAGTTNAAATACACCGACAGTAAA
TGGTTCACGGCCGCCCGGCAGGTCAGTGCCCCCCGTGAAAGACAGAATTGTGGTTTTCCTGGTGTC
ACGCCCTCCCAGTGTGCAAATNAGGGCTGCTGTTTCGACGACACCGTTCGTGGGGTCCCCTGGTGC
TTCTATCCTAATACCATCGACGTCCCTCCAGAAGAGGAGTGTGAATTTTAGACACTTCTGCAGGGA
TCTGCCTGCATCCTGACGCGGTGCCGTCCCCAGCACGGTGATTAGTCCCAGAGCTCGGCTTGCCAC
CTCCACCGGCACCTCAGACACGCTTCTGCAGCTGTGCCTCGGTTACAACACAGATTGACTGCTCTG
ACTTTGACTACTCAAAATTGGCCTAAAAATTAAAAGAGATCGATNCCAAAAAAAAAAA

| | |
|---|---|
| Sequence 482 | cMhvSC012a10 |

ACGNNCCTNTNTNTNCAGGCCATGGNAAAAAAAATCCAATTATAGACCGTCTTGAGAGTGTGGTC
TTGCTTCTTATGTAGTATNAANTTNGAGAACTGATAATTAATGCATNGATTNACNTTNTTNAACNN
ATTNAATNNTAATTGTGAAAAAANAATTCNANGCACNNATNGTNAAATTGAANANNANANNAGG
ANATTTAAGACCTTGAGGAGCTNGAGCCGGNCATTATNTTAAATGTGAGGGGTTTATGACACNGT
ACCCTNCAATGGTGTTNACTANNCTTNNGNANATGNACATGCNNNCNATNNTNCNCATTGNNNCT
TAAGGCGTTTGGGGTCACACAGTNTTNAANGTNNTAGAAGACCNGTCCCCTAGGAGTNCCCNTGA
TTTCATCTNAACATCTTTGCTGATGCTCANAGGTACTTTTGCCAAGCANTAAAAGATCCAGGTATA
TAGCANNTAGTTGNGGTGTCATGTACTGCAAACATGCAAACAGTTTTTTNAANTTCANCCTTGGGC
AGAATCTNCTTTCAATAGAAAAGTNCTTTTGGCGTTTTTCNACTTTTTGNGNAACTCCAANANAGT
TNTTGTTCCCAGA

| | |
|---|---|
| Sequence 483 | cMhvSC012b02 |

CCGGGCAGGTACNCCATTGAGNGCTNTNNTNCCTTAGCNACNAGGNNGNNNCTGGNNANNNGAA
ANNTCACTAAANTGNANTTANNANTNNAGNNNAACNNGNNNNTNNTGTNNNTCATNCATGAANN
TTNCANCTNTTANNCTNTTNTGNNNGGNCTGCCCNTTNTTCTANACGTGGATGGTGGAATAACCAT
TGATCTGAGCNAACCTTTATTGTGANCAACTANTGAANAAGGNCAANCNTGTCTTANTANNNNGA
NGGAANAGCTNCATCTCNACANCNAAACAAACCATCAAGGTTTGCCACTTGTTGAAATTTGNNGC
CACAACTNCNGACTACACTGACTTGACAATTAAACCCACTCCCCTTTTNAAGGGTTTCCTTCCGNT
AAAAGATTGGGAAGANGGCCATATTATNCAACAAACTCATTANATCCCCGTNACAGTACGAGTAN
NCTATATGNAAACTACCANTTGGGCTTTGATTTTNATTCGTAACGCATTGCTTTTTTTTNTGNANCA
NTNNTACACTNCATTTTTTAAGAATTCAANTNTTTAAAAATTNGTTTGCTTTTCCTTAANGAAATTC
ATCCNGGCCAAGGAATAAGGGGGGGNGTTTTANTNGGAATTNTAAGGGCCAAAGGNTTNCNCCCC
NCAATAAAAATTGNTTGCTACAAACTTNACNNCAANAAAAAGAGTTTTGGGNNCNTTTNTNCCCC
AAAAAAATNNAAACNTCCAACCNANNNATTCNTAANCTCGNNTTTNNAANGTNCTAACAANTTTT
AGGGANTTTTTTTTTTT

| | |
|---|---|
| Sequence 484 | cMhvSC012b04 |

AGGNNCCCNTATTNGNNTTTTTGNNANACANTCCATGGANAAACNGGTGGAGCTGCNCCNAGGCN
CTGANCNTGNCNCCCTCTACTGNANTAACTNTANNCACGACTNNTACTTACTCTGNGCTNGNNGTG
ANAAGGGNACNTGNCCGGGCGGCCGACGTACNGGTGCTCTCCAGGCTGGCAGCCCGCTGCCTA

| | |
|---|---|
| Sequence 485 | cMhvSC012f09 |

ACGNGCCNGGNACAGTGGNANGANNANGGCCCNCNNTNNNATTTNCCTNNCNGGCCTAAGNNAN
TNTNTNACTTGCAGCCTCCCAATTATCTGGGACTACNGGCGCATGCAACCATACNTGGNTAATTCN
TGTATNTNTTGTGGAGACAGCATGTGGCTGTCTCTACATANCTCATGNTGTCCGCCCAGGCACAGT
GATTAAACTCCCNGGCTCANGTGATCCTNCTGCCTGGGCNTGNNAANNTGCTNGGATTACAGGCA
TATGCCAGCNTGNNCTGNCTTTCCTGTATTTNGTAATNTAGGAANTGGGAGTTCATGNTGGGAGGC
ACATTNCCTATAGGACTCCNGNNCAACCTACGNTGAAAATANGTATTCCTANAAAANGGNTTNTA
CNNACTNATATTACGGGGCACCANTATTGNTATCAACCTGAGAATGCTTTTTACATTATTTNGAGN
AGAACCTACGTGTNATTCANATAGTAAAAACTCAAACCCTAAANCNGAGTGAGAGCANCNTANGN
TTCANGTTTTCTAATATCCTTAAGATTTTCCTTTGCTTCC

| | |
|---|---|
| Sequence 486 | cMhvSC014d02 |

CCGGGCAGGTACTTGNGGAANTCATGCCTGGAAGGGGCTTGGGCACNTNANTAAGNCNGCCNTNN
TTTNGNTAAAAGGAGGGAAAAATCTACTTGAATTGACTTACCANANGCTTGATAACAGAGATGNC
TAGGATTAAAATCCNGATANTGACAAATCCACCCNNAAATCCCATCTTCTANTNTNATGNCCCCCC
GCCTNCCTGANTCGCTNTNNAACNNNATGGATNCCCCGGGNTCTAGGAANGGGNNNTNAAGCNNA
TCTATNCCNNCCNNCTCTGANGGGGGGCCCNGCACCCAGCTTTTAGTNNCCTTNNATAGGGGNTTA
ATGNGCGCGCTTGGCGTAATCATGGT

| | |
|---|---|
| Sequence 487 | cMhvSC016e01 |

GCTCCACCCCCGGTGGCGGCCACAGGAGCACATNTCCCTCTTCTNNAGGTGTGTCCCTCAGCATGA
CGCTGACTGATGTGNCATAAAGACTGACTNGTGACACTGGCTAGTGCTNNCNAGCCATCTAGACT
ACAACTTATTCTAGATACACCCTGGAGAGATCTTAAAGNGCATATCTNNTTCACCCANAGAAGGC
ATTTATGCCTT

| | |
|---|---|
| Sequence 488 | cMhvSC017a07 |

ATTGGAGCTCCCCGCGGTGGCGGCCGCCCGGGCAGGTACTTTTTTTTTTTTTTTTTTTTTNGNAAAA
NNGGGGGGNAAAAANTCCCCNANTNNNTTTANTTTTTTNAANCCNNNCTTNAAAANNCCCCCNNN
NNGGGGNNNNCNGGGGGGGAAAAAAANACNTGGGGGGAAANNAAAAANTTGGGCCTTAAANNN
CAANCNNANGNTTTNAANNNNNCCCCNGNTTTTNCNGNAAAAAAANTTTTNNTNNNTCNNNAAAN
AAAAAATTGNTCTNTNNGGGGGAAAAAAANGNCCCCNNNGGGGGGGNNNNNNCCNAATTNTTTN
NGGGGNNTTTTTAANGNGGGGGGGNNGAACCCAAANCCNNTTTNNAANGGGGGGGNTTTTTANN
NCCNNANNGGGGGNAAAAATTTTTNCCCNCNNNNNNNGGGTTTTTNCCAANGNNNAAAAAAGNN
TNNCNTTTTNGNNNAANNCNTAAATTTCCNGGGGNTTTTANNGGGTTTNGGGGCCAANTNAAANG
GAAANNAAAAATTTTTTTTGGANNANNCNTTTTNCCCCCGGCNGGGNGGGTTTCCCCCCCCCCNAA
AAATTTCCCACATTTTTTNNCNNAAAAAGGGGGGGCCTTTTAACCNTNCAAANNANCCCCCNTGGGT
TNNGGGGGTNAANANTNGGGCCCCCCNAAAAGTTNTTTNAANAAAANNNTTTTNNAAANGGGNN
GGGGGNCCCCCCCTGTTTATTAAATNGGGAAACCNNNAAAACNNGGNGGTTNAAAAAAAAGGGA
NCCCCCGGGNGGGAAATTNNTANNAANTTTTTNNANCCCCCCCC

| | |
|---|---|
| Sequence 489 | cMhvSC019c02 |

NNNGNGCNGGTANCTTGGNCGGTNTTNACGGGNTTCNTGNTCATGGNGNNNNGGATNACGTGATA
CTAGACAAAAANNCCATTCCNNCCNAGNATGTCTTGNGCNNGGCGGGCGATNNNCANGGCTTTNC
NACANGTATTNCTCTNCAGCAGANAAACCATNTTNGNGGCAGNCTTGNNCNGNNCCTTNAAGCAN
CCGCTNTAAAACTANNGGATNCNCNGGNCTGNANGAATA

| | |
|---|---|
| Sequence 490 | cMhvSC019c03 |

AGGTACANNGNNACNTANTTCNTTNTTNCCNAACNNNAANNTNGCNGNTGNTGNTGGTGTNATAT
GTGNACTTACTCCGCTGNCGACCNCTCANGGNTATATCCAAATCGAGGCCATTTATCAGCGACTGA
GTCAGGACGCTTATCTATATANTTTAACCCCCTNCNNCCNAAACCATTGACGCCATGNATGGGTTA
TNCGCAGTGACCGACAACCGAATTCGCTCTAT

| | |
|---|---|
| Sequence 491 | cMhvSC019d01 |

ACNTACTNGGTNCNNCTNTNTTANGAGGGTGNNNATGGACACCACTCCAGGTCTTGATGCTCTAG
GTATCTCACCTTCCATCCACACATGTTCACGTGGGTCNCGACTANAATTCACTCTATAGAGACACA
CACAGATGTAGGCCTTGNTGNTCTTGAATGCTTCTCAATTACTGANTGGCGGGATAACATGAGCNT
ACTCCGAGGANGGGCNTGGCNTTNTGNGCTCNACCCTAGGTACTGACAAGATTGGATNNCCTCCN
CCNAACACCCAATTGGTTGTAAATGCGCTNTAGAACTAGTGGATCCCCTNGGGCTGCATTTAATTC
GATATCAAGCTTATCTATTACCAACTAACCTAT

| | |
|---|---|
| Sequence 492 | cMhvSC021a02 |

ACGCCCGGGCAGGTACTTTTTTTTTTTTTTTTTTTTTTTTCCCTATCGATCTCTTTAAATTTTTAGGCC
AATTTTGAGTAGTCAAAGTCAGAGCAGTCAATCTGTGTTGTGAGCCGAGGCACANNTGCAAAAGC
GTGTNTGAGGTGTCCGGTGGAGGTGGCANCCNANCTNTGGGACTAATCACCGTGCTGGGGACGGC
ACCGTGTNAGGATGCANGCAGATCCCTGCAAAAGTGTNTAAAATTCACACTNCTNTTCTGGAGGG
ACGTCGATGGTATTAGGATAGAANCACCAGGGGACCCCACNAACGGGGTNGTNGAAACAGCACN
CCTTATTTTGCCCACTTGGGAGGGGCNNTGACACCAAGAAAACCANATTTTTTGTTTTTTCACGGG
GGGGCCANTNTACACGTTTNTGTNTTGGGCCTTGGGCCGCTNTANAACTAAGGGGATCCCCCGGGC
T

| | |
|---|---|
| Sequence 493 | cMhvSC029d07 |

GTTCTGAGCCTCAGCTGACCATANTGCTCATGCCAAGTCCTGAGCAGGGCATNTTGAATGGTGGTT
CCCTCATGACTACATACACCGTTAGGGAATGTTTCGTTAAGAGGAAATCAAGATGTTCTAACCTGT
GAAGGTAGAATAGATTCCAGGCTACACAAACACATGAAGTGTGCCTTATATTGATTACTAAAGAG
GTTGCTGCCAAGACTGCTTCCAAAGGGCAGAANATAGCCCTAAAAAATGTTTGCAGTGTGGAAAT
GCATTTTTAATAAGTCATATTCTAGTAACAAGTTGCATTTGGTAAGACACAAAGAAACAATGTTGG
TNTGCAGAGTAGAAATCTCTGGAAGATGATATTGTCATATCAGAGATATTGTCAGTATCAGGAGAT
ACCTTGAAATCTCTGGAAAGATGATTTTTTTGTCTCACATATGGCATTNCACAAANTAANAATGCC
CAAAAACTTGCAAAAATTCACCCCCGTACCTCCNGGCCCGCTTNTTAGAAACCTANTTNGGGATCC
CCCCGGGGCCTGCCAGGGAAATTTCNATTATTCAAAGNCTTTATNGGATACCCCGNTNCTACCCTT
CCNANGGGGGGGGGC

| | |
|---|---|
| Sequence 494 | cMhvSC031e09 |

CGCCCGGGCAGGTGCGAGAATGAAGACTATTCTCAGCAATCAGACTGTCGACATTCCAGAAAATG
TCGACATTACTCTGAAGGGACGCACAGTTATCGTGAAGGGCCCCAGAGGAACCCTGCGGAGGGAC
TTCAATCACATCAATGTAAGAACTCAGCCTTCTTGGAAAGAAAAAAAAAAGAGGCTCCGGGTTGA
CAAATGGTGGGGTAACAGAAAGGAACTGGCTACNNGTTCGGACTATTTGTAGTCATGTACCTCGG
CCCGAGGTNCTTTTGCTNTCTGCCTTTGCCAATATTTACTTTGGATCTTTTGTTTTTTGCCNTTTATT
TNGTTTTTTGCCTCTGNTTTAAAACANGCCTAATTTNNGAAAGGGCAATAAGNGAANGCTTGCNAG
TAATACATTGCTGAAAAATGCNANTTCACCAGAAAAATCAAGCAATTNGATTTTCTTTANGAATGA
AGTGCCTAGAAGTTGGTNCTGTNGGCNATTCAGAGGGTNAAAAATNGANNTAACNAATGGGGCCA
GGGACTTCCTGCCTTGGATGGACNTANATTCCAAACACCNNNTTTTGAAACACTNGGATTTTCAAN
ACCACNACCANATGGATGATAAAATGGANTNGNTTTACCACNCCTTANTANCACCACCAACAACC
TANATTGTGGGTTAGNCCAAATGGAAAAAGAGAAACNTGGTNANTACTTCCTTTGGGNTGCTAAA
TTGGGAAAANAAAA

| | |
|---|---|
| Sequence 495 | cMhvSC035b03 |

AGGTACAACAGGCTTCAGATGTTACTATAGATAATCACAAGGAACACTGCGCTTGGGGCATGACT
GCCCTCAGCAACCCTTCTGGCGGCAGACACAGTTGTTAGTTTTCCAACATCCTGCTTTCATGAGAA
CAGTTTTCTGTTTGCTCATATAGCCTTCAGTGGTATACTGAGTTGGTCACGACCTTCATTCTTTCGG
CCTGTAACATCTCCCCATTTTTGTTTTTGCATTAATTGAATAAAGGTAATTGCAGGTTGTGCAGCTC
TCAATTGCCGTTTGGTGGTCCAGCTGATTTTGCAGACTTATATCAGCTGTCAGCAGACTCGTCGCA
GGGTTTCTCATTCTCGTTCTTCTTGTCAGTGTCAGTTTCTCTGCTCCAGCAGACCTTCACTCACGTCC
CTGTCCTAGGTGCCAGTTGTCGCTGTTGGTTGTTATGGGAGTGAACGAAGGGGGATGAATGCAGA
ACGAAGACAAAGACAAAAAGTATTTTTGGAAGAAAGGGGTCAGGGGGCTCCTTCTAGTGAACAAG
GGGCCCCCCGCGTACCCTTGNCCGGCGGGCCNTTCTAGAACTAGGGGGATCCCCCCNGGGCCTGG
CAGGGAATTTCNAATATTAAAAGCTTTATTTGATACCCNNTCCGANCCNTTGAANGGGGGGGGG

| | |
|---|---|
| Sequence 496 | cMhvSC038a11 |

CCGCGGTGGCGGCCGCCCGGGCAGGTACGCGGGGAGGTGGTGGCGAANCGCTCCTNCGAAAGGTT
TCNGAAGCTGGTGGTAGCTAGNNAAGATAACGCTGCGTTAGGGNATANNGCTTTTTNATGATGGA
ACTCCGATTGAAAGCAAGTT

| | |
|---|---|
| Sequence 497 | cMhvSC038c06 |

GGGCGAATTGGAGCTCCCCGCGGTGGCGGTCGCAGAAGAGAATCCCGTTGGTCTTGCTGTGCTGG
ATGAAGAAAAGGAAGGGGTGGTCGGCGCAGAAGCGGGGGACGAANNANGGCACACCGCATCACC
ANAANANCAGTTTTTNNNNNTGCAGCCTCCGNGCCTTCCTCATTGACCTCCACAAAAGACTTGNGC
NANAAACCTTTGGAANANNAAANNAGNTCTTGCNTGGNACCANTTCCANTANAATTTCTTGCCCTT
TGCCCA

| | |
|---|---|
| Sequence 498 | cMhvSC004e10 |

NTTCCTCCCACCCTTAGGGGGAAAA

| | |
|---|---|
| Sequence 499 | cMhvSC004e11 |

ACCGCGGTGGCGGCCGAGGTACCTGTCTTGGCCTCCTACAGNCCTTTTTACTTATTTTGTTTTTTAN
AATAGAGACAGGGTCTTACTATGTTGCTCAGACNGGTTNCAAACTCCTAGGNTCAAGCANTCTTCC
AGCCTCAGCCTCTAAAGTGCTGGGATNACAGGCATGAGCCACCACACCCGGCCAAG

| | |
|---|---|
| Sequence 500 | cMhvSC004g06 |

ACCGCGGTGGCGGCCGAGGTNCTTTTTTTTTTTTT

| | |
|---|---|
| Sequence 501 | cMhvSC008b01 |

CCGGGCAGGTGTGCGTGTGTGGAGTAAAATGCATCGGACAGTGATTGACTCCACTTTTGANTGAG
ATGTGGAGGCGGTANTGG

| | |
|---|---|
| Sequence 502 | cMhvSC012d02 |

AGGTACACACAGTTNACCACAAAACAGGCCTNTNTGAAAAAGCCATTGCCATGGACTGCCATACA
GACAATGACAAGACACAAATA

| | |
|---|---|
| Sequence 503 | cMhvSC012d06 |

ACNNGCCAGGNNCNTNNNNGCCTATTACACCTACNTGNCTCTGGNCTTTTATTTGNACNNCGANG
ANGTGGATCTNGAAGGNGNGANCCANTNCTTGCGNNAANTGNCNCATGAGAATCTCGA

| | |
|---|---|
| Sequence 504 | cMhvSC037g12 |

CTCCCCGCGGTGGCGGCCCGCCCGGGCAGGTACCACCATGCCTGGCTAATTTTTATATTTTTAGTA
GAGACGGGGTTTTGCCATGTTGGCCGACTGATATCGACCTCCTGACCTCAGGTGATCTGCCCGCCT
CGGCCTCCCAAAGTGCTGGGATTACAGGCGTGAGCCACTGCGCCTGGCCAAGATTAGAGGTTTTAT
ACTTTGTATCATCCAACTTTGAAATTCTTGCTTGCTGGCACCTTGGCAAACCTACTGCCTGACACAT
GTGAGTGGGTTTCTAAAAATTTTTGT

| | |
|---|---|
| Sequence 505 | cMhvSC038a01 |

ATAGGGCGAATTGGNNCTCCCCGCGGTGGCGGCCGCCCGGGCAGGTACTAGCTACTCTGGAGGCT
GAGGCAGGAGAATGGCGTGAACCCGGGAGGCAGAGGTTGCAGTGAGCTGAGATCACACCACTGC
ACTCCAGCCTGGGCGACAGAGAGAGGCTCCCTCTCAAAAAACGAAACAATGTTCTTGGCTGGGCG
CCAACANNTTTANNACCTGTTAATTCCCAAGCNGGTACCCT

| | |
|---|---|
| Sequence 506 | cMhvSC040g02 |

CTCCCCGCGGTGGCGGCCGCCC

| | |
|---|---|
| Sequence 507 | cMhvSH037e08a1 |

AGGNACTNTNNTTTTTTTTTTTTTTTTTTTCCTGANATGCGNGTGNCCTATNAACTTTCGATGGTAGT
CTCCGTGCCTACCATGGTGACCACGGGTGACGGTGGAATCAGAGGTTNTANNNCNGAGAGGGAGC
CTGAGAAACGGCTACCACATNCAAGGAAGGCAGCAGGCGCGCAAATTACCCANTCCCGACCCGGG
GAGGTAGTGACCNAAAAAAAAAAAANGNANGGANAANACAAGGGTNCCTCGGCCCGCTCTAGAA
ACTAAGNTGGGATCCCCCGGGCTGCAAGGGAAATTTTCGAATATTCAAAGGCTTTNTTCGGATNAC
CCGGNTCGGACCCTTNNAGGGGGGGGGGGGCCCCGGGNTNCCCCCNAGGCCTTTTTTTGGGNTTC
CCCTTTTTTAGNTTGGAGGGGGGGNTT

| | |
|---|---|
| Sequence 508 | cMhvSH066a01a1 |

GCTCCAGCCCCGANCCCTGGACATCTACTCTGCCGTGGATGATGCCTCCCACNAGAAGGAGCTGAT
CGAAGCGCTGCAAGAAGTCTTGAAGAAGCTCAAGAGTAAACGTGCTCCCATCTATGANAAGAAGT
ATGGCCAAGTCCCCATGTGTGACGCCGGTGAGCAGTGTGCAGTGAGGAAAGGGGCAAGGATCGGG
AAGCTGTGTGACTGTCCCCGAGGAACCTCCTGCAATTCCTTCCTCCTGAAGTGCTTATGAAGGGGC
GTCCATTCTCCTCCATACATCCCNATCCCTCTACTTTCCCCAGAGGACCACACCTTCCTTNCCTGGG
AGTTTTGGGCTTAAGCCAANANATAAAAGTTTTTTATTTTTCCTCTTGAAGGGGAAAANGGGCTTC
TTTTTTCCTGGGTTGTTTTNCAAAAAANTTAAAAGNAANCCCCTTTTTNGGATTGTTTTNCTTGGGG
GGAAAAAAAAAAAAAAAGCCCTTTTGNTANNGGGGGGNTNAAAAAACCNGTNNNTNGAAAAANG
TTTTTTTTTTTNTTTTTTTTTTTNGGNTTGGNNNAANANCNTTTTTNTTTNAANCTTTNCCGNGGGGG
GGGGNNNNTTTTTTTAAAAAAAANANGGGGCNCCCCCCNCCNGGGNNGNNGGGGANGAAAATNN
NTANTTNTNGNGTTTTTNTTCCCCCCCCCCCCCNCCCN

| | |
|---|---|
| Sequence 509 | cMhvSH026b01a1 |

TAAAACTTTATTAANAGAATNTTATCAGTCAAATTTCCAGATTAAGAATAACGTTCTTGGTTTCAG
TCTTCATTTGTCTTGCTTGAAACCTATGGTTGCGCATCACCTGCTTCCAGCACTTTAGTGAGATCAA
AAGTGGGCATAATACCCTCCCTGACATCAGGACCATNTCCAGGCTCATCCTNTATNTTAAGCAGAG
CCAGTTCCTGTTGAAAAGCTTCCATGTCAGGCCCTTGAAAAGCAGGCNCTGCTTGATTTTCAATCT
CCCCACTAGGGGCAATACCCGGATTNTNAGTGGGGGGTNCCTTTTTTNGNCGTTTTTNNCTNAGGG
GGGCNCGGGGCANTTCCNNATCCCCCCCGGGGGNGGGNAAAAACNTTNGGGGAANTTTNNNTNTT
TTTTNAAGNNNGNNNGGGNAAATTTTTTTTTTAAAAAAAGNCNNNNNTTTTTTTTTTCCCCCCCCG
GGGNTTTTTTTTTTTNGGGGNNGGGGGAAAAAAANAAAAAAAAAGGNNNGGGGGGGNAAAAAAA
ANAAAAAAACTTTTTTTTTTTTTTTTNNAANACNTTTTGNGGGGGAGCCCCCCCCNTNTTATNTNCT
TNGGNNGGGGGGGGGGNTTTTAAAAAAANAAANNAANCCCCCCCC

| | |
|---|---|
| Sequence 510 | cMhvSH109g02a1 |

ATATAGGGCGAATTGGACTCCACCGCGGTGGCGGCCGAGGTACGCGGGGACGGAGGGCGGTGCCC
GCGTCAGTGACCGAAGGAAGAGACCAAGATGAATACAGAGCCCGAGAGGAAGTTTGGCGTGGTG
GTGGTTGGTGTTGGCCGAGCCGGCTCCGTGCGGATGAGGGACTTGCGGAATCCACACCCTTCCTCA
GCGTTCCTGAACCTGATTGGCTTCGTGTCGAGAAGGGAGCTCGGGAGCATTGATGGAGTCCAGCA
AGATTTCTTTGGAGGATGCTCTTTCCAGCCAAGAGGTGGGAGGTTCGCCTATATCTGCAGTGGAAG
AGCTTCCAGCCATGAGGGACTAACATCAGGCAAGTTCCTTTAATGCCTGGCAAAGCACGTTNCTTG
TTGGGAATACCCCATGACACTTGTCATTTGGGCCGGCCCGCTTCTAGNAACTAGTTGGGATCCCCC
CGGGGCTTGCAGGGAATTTCGAATNTCAAANCTTTATCNGAATTACCCCGNTCTGAACCTTCGAAG
GGGGGGGGCCCCCGNGTACCCCCAANCCTTTTTTGGTTTCCC

| | |
|---|---|
| Sequence 511 | cMhvSH124f02a1 |

AGGACATAGCCCCAGAAGGGCGGACTGGCCGGAGTCCAGGGATGGCAGCCAACGCCCCATAACA
GAGATCAGCATTGGACTACAAGAAGAGGCAAGGAGAAATCAAGGATCAAAATTTAAGTAAAAGA
AAAGTCAAGTCATTAAAAATAGCCCCCTCATTGAAGAGTGGGAACGTAGGTGTGATGTTCTGGCA
TAAGGAGTGAAAAAAGAAAAAGCTCTATTACTTGAAGCTTTTCACCAGGGGCAGAGAGAATGGCC
GGAAGTGAGAAACGTGTGTGTGGATGCTTACACCGATGCCGTCTCCTAATATTGGAACATGGCTTC
CAGAAAGGAGAACCAATTATTCCTAATTCCACGGGCGGCATCCTCTGACTCCCAAACTCCCAAAGT
GGAGGGCAAGAGCTGCCCTTACCTTGAGGAAGCTTCAGAGTGTTTNTGGTAAAACTNTTTCCGGGG
GTGCGACATANGGATNCTTTTCANAGCTCCCTTGGACAATGGTNCCCTTGCCCCGGGGCGGGCCCG
NTTCTAAGAAACTAGTGGGATTCCCCCCCNGGCTTGGANGGAATTTCCATNTTCCAAGCTTTTTTC
GAATACCCGTCCCNAANCCTCNGAAGGGGGGGGGGC

| | |
|---|---|
| Sequence 512 | cMhvSH110a07a1 |

GAATTGGAGCTCCCCGCGGTGGCGGCCGAGGTACTTTTTTTTTTTTTTTTTTTTTTTTTTGGTTTTTTT
TTTTTTTTTTTTTTTTTTTTTTTCCTTTGGGCAACACTTTATTGGGAAANATTTACNCNCGGGGACCT
NTCNTAGGCCAAGCGATNAAAANAGGGCCCCAGGAGCCCTGGGGTCCCNAGGNGGCTCAAATGG
AANCCATGGGACGGCCNNTNTAAAACTAGNGGATCCC

| | |
|---|---|
| Sequence 513 | cMhvSH038g10a1 |

AGGTACGCGGGAGGGTTCTGGTGTTTGGTTTCTTCATTCTTTACTGCACTCAGATTTAAGCCTTACA
AAGGGAAAGCCTCTGGCCGTCACGCGTAGGACGCATGAAGGTCACTCGTGGTGAGGCTGACATGC
TCACACATTACAACAGTAGAGAGGGAAAATCCTAAGACAGAGGAACTCCAGAGATGAGTGTCTGG
AGCGCTTCAGTTCAGCTTTAAAGGCCAGGNACGGGCCACACGTGGCTTGGCGGCCTCGTTCCAAGT
GGCGGCACGTCCTTGGGCCGTCTCTAAATGTCTGCAGCTNAAGGGCTTGGCACTTTTTTTAAATAT
AAAAAATGGGGTGTGTATTTTTTAATTTTTTTTTGTTAAAGTTGATATTTTGGGGTCTTCTGTTGGA
CAATTCGGGGGGTGGATCCTGTTCTGCGCTGTGTACCTGCCCGGGGGCGGGCCCGCCTTNTAGGAA
ACTTAGGTGGGATCCCCCCCGGGGGCTTGCCAGGGGAAATTTNNGATNNTCANAGGCTTTATTNCG
AATACCCGTTCCGAACCCTTCNGAANGGGGGGGGGGGCCCCGGGGTACCCCCAANCTTTTTTGGTT
TCCCCCTTTTAAAGTGGAGGGG

| | |
|---|---|
| Sequence 514 | cMhvSH109f02a1 |

CCGGGCAGGTACTTGGAAAACTTGTTGAAGATGATGGGGNNGGGAAGGGCCACCANAAAAANAA
NANNTTNTTNTTCTTNTGCTGGCGATGAGCTTTCCCGCCAAGGTGACCGGGTGGGTGTCTCCATAG
CCCACAGTTGTCATGCTGATGGTGGCCCACCACCAGCAGATGGGGATGCTGGTGAGGCTGGATGT
GTGGTCATCTTTCTCCACNGAGTNGATAAGCACAGAGAAAATGGAAATGCCCACAGAGAGGGAAG
AGAAGCCAGGAAGCCCAACTTTCATGGTTAGCNTGTGTCTCCAGTGTGGCCACCNTAGAAGACCC
GGAAAGTCCTACCCGAGTGCCCGGGCCAAGCCTTTTAGAATTCCGGGAAAATCCTCATTAAAGCCC
GTTAGGGATCTGNGACCCACCCTTGCCCCATGTTCTCNAATATCCCTCACTCTCTTTNCTCCTTGGG
TGGTCTTACAGCCCCAACNGTTGGCATAGGAAAGGGGAAATAATTAGAAGACAAAAGTTCAAATG
GATGGTTCNAACAGGGTTTTTTTTCCCANGAAATTTTCTTTTTGGACAAAGGGAAGCCGGGCCAAG
CCCAAGGCCCCGGGACCGGGCAAAGCCTCCC

| | |
|---|---|
| Sequence 515 | cMhvSH110d10a1 |

ACGCGGGGATACAAGAAAGAGGAAGAGAAGCAGGAAGATTCTACATACAGGCTGGCTGTGTTTCC
CCTGGGGCATGCTCCTGTTTACTGGTCCCATGCCAGGTTGACTCATTGCCTCGTTCATGGGTGGAAT
TAAAATGCCTACCTGGGGAATAAATAGAGCAAGGCTGGGTGCTCACCTCCACAGCGGCTTCCTTG
ATCCTTGCCACCCGCGACTGAACACCGACAGCAGCAGCCTCACCATGAAGTTGCTGATGGTCCTCA
TGCTGGCGGNCCTCTCCCAGCACTGCTACGCAGGCTCTGGCTGCCCCTTATTGGAGAATGTGATTT
CCAAGACAATCAATCCACAAGTGTCTAAGACTGAATACAAAGAACTTCTTCAAGAGTTCATAGAC
GACAATGCCACTACAAATGCCATAGATGAATTGAAGGAATGTTTTCTTAACCAAACGGGATGAAA
CTCTGAGCAATGTTTGAGGNGTTTATGCAATTAAATATATGACAAGCAGTCTTTGGGATTTTATTTT
AACTTTTCTGCAAGACCTTTTGGCTTCACAGAAACTGGCAGGGNNTTGGGNGGAGNAAACCAACT
ACCGGATTTGNTTGCAAAACCCACACCCTTTCTCTTTTCTTTANNGGCCTTTTTGACCTACNAAAAC
TTACAANGAANAAANTTGNTGGAAAACCTNGCTTTNCATGGTTTTATTTTAAATTAAAATTGGANG
GGCAAAAAAAAAAAAAAAAAAAAAAA

| | |
|---|---|
| Sequence 516 | cMhvSH046b03a1 |

CCGAGGGTACTTTTCTGAGACTTNATCCTCGAGGCCTGGTGGGCTACCGGCTCTTTTCATCTTCACG
GCCACCCACAGAAATGAAGCAGAGTGGCCTAGGCTCACAGTGCACAGGGCTGTTCAGCACCACAG
TGCTGGGTGGCTCCTCCAGTGCCCCGAATCTTCAGGACTACGCCCGCAGCCATGGCAAAAAGCTAC
CACCTGCCAGTCTGAAGCACCGAGATGGGTTTGAAGGGTGTTCCATGGTGCCTACCATCTACCCTC
TGGAAACACTGCATAATGCCCTTTCCCTACGTCAAGTGAGTGAATTCTTGAGTAGAGTCTGCCAGC
GCCACACTGATGCCCAGGCACAGGCATCTGCAGCCCTCTTTGATTCCATGCACAGCAGCCAGGCCT
CAGATAACCCATTTTCTCCACCACGT

| | |
|---|---|
| Sequence 517 | cMhvSH108g03a1 |

AGGTACTTTTTTTTTTTTTTTTTTTTTTTTTTTGGTTGNGTAATNCTTTATTTGAAAAAATGAAAAGT
GCACACACACACACACACATACACACACACACACACACACTTACATAGGCACAGGATAATCTGGA
AGTATGACCAGCAAATGATAACTGATTCCCTNAGGGGANAANAAACTGGGTGGCTGAAGGACAG
GAATGAGAAANAAGGACAGTTGCGCTTGTTTGTATCGTTTGAAATTGTCCAGTGTGTATGTGTTCT
TTTCAAATGTTTGAAGAACCATTGGCTCCCTTATCAAAATGTAAATACCAAGGAAAATN

| | |
|---|---|
| Sequence 518 | cMhvSH075f10a1 |

GNGGNGGCGGCCGCCCGGGCAGGTACGCGGGGGGCGGCGGCGGAGAGAGCTGGCTCAGGGCGTC
CGCTAGGCTCGGACGACCTGCTGAGCCTCCCAAACCGCTTCCATAAGGCTTTGCCTTTCCAACTTC
AGCTACAGTGTTAGCTAAGTTTGGAAAGAAGGAAAAAAGAAAATCCCTGGGCCCCTTTTCTTTTGT
TCTTTGCCAAAGTCGTCGTTGTAGTCTTTTTGCCCAAGGCTGTTGTGTTTTTAGAGGTCCTATCTCC
AGTTCCTTGCACTCCTGTTAACAAGCACCTCAGCGAGAGCAGCAGCAGCGATAGCAGCCCGCANA
AGAGCCAGCGGGGTCGCGTAGTGTCATGACCAGGGCGGGAGATCACAACCGCCAGAGAGGATGC
TGTGGATCCTTGGCCGACTACCTGACCTCTGCAAAATTCCTTCTCTACCTTGGTCATTCTCTCTCTA
CTTGGGGAGATCGGATGTGGCACTTTGCGGTGTCTGTGTTTCTGGTAGAGCTTCTATGGAAACAGC
CTTCTTTTGACAGCANTCTACCGGGCTGGTGGTGGCANGGGTNTGTTTTGGTCCTGGGAGCCATNA
TCGGGNGACTGGGNGGGACAAGAATGNTNTAATTNAGGGNGGCCCCACCCTNGGGTGGNGGGTA
CCNCGGGCCCCATATAAAAANAAANGGNNANCCCCCCGNGGGGGGGGGAAANTTTAAATCNANG
NCTTTCCCNCCCCCCCCCCCCNGGGGG

| | |
|---|---|
| Sequence 519 | cMhvSH128d09a1 |

CCGGGCAGGTACGCGGGAGGCATGCACCACCACGCTCGACTAATTTTTGTATTTTTAGTAGAGACG
GGGTATCACTATATTGGTCAGGCTGGTCTTGAACTCCTGACCTCAGGCGATCTACCCGCCTNGACC
TCCCAAAGTGCTGGGACTACAGGTGCCCACCACCACGCTTGGCTTATTTTTTTTGTATTTTTAGGAG
AGACGGGGTTTNACCGCATTAGCGAAGATGGTCTCGATCTCCTGACCTCGTGATCCACCCGCCTCG
GCCTCCCAAAGTTCTGGGATTACAGGCTTGAGCCACTGCGCCNGGCCTAGAACCCTGCTTCTCATA
TAAGATGGGCCTGCACCTACCTCTGGCATGTTTTTCTTTGTGTATTTCCCGTTTTTNATCCTGTAACT
AAATGCTCATTATTTAANAACACTCCAGTTACTTTTCCCTTTAGGCCTGGCAAAACTTTNCTNTTTC
TTTTTTTTTTTTTTTTATAAACTGNAACCTTTGGGGCGGGTTTTAGAAAACTAANTGGGATCCCCCC
NGGGNCTNGAAGGGGAAATTTGGNNTTTTCAAANCTTTAATTNNANTACCCGNCCCANCCCCCAA
GGGGGGGGG

| | |
|---|---|
| Sequence 520 | cMhvSH075h11a1 |

TGNACCTCCACCGCGGTGGCGGCCGTTTGAGAAGCCANCGCTCACCCACCCGGGGTCTCTGTGCAT
TGACCTTTGGGTGCTGACTTGGAGAAAAGCACAAACACGACCAGTCCCATCCTGGCTCCCGTGGG
GCTTCTTCTATCTACGCATTGTATCGACTGCATTAGTTGGACTAAGATGATGACTCAGTTAAAGGA
GGAGACAAATGCTGACTGTCTAAGCAAGAATGGCCCAAGCTGGCAAGAAAAAGCACACTGNGAT
ACATAGGGATACAGGAAGGGCAGGAGCCTTTTTGCCTGCCGGGATCTAACAANCATTTACATTTTG
TTTTGCCTGCCAAACCTATCAAGAAGGGATTTCTTGTTTGGGCCCAGGGGGAGTCTCCACTTGGAA
ACAAAACAAAAAATGGCANGTCAAAAAAGTTCTTTGAGGTGTCCCTATTCCAAGCCAGCCCAAGA
AGTCCTCAATCCCGTCATCCCACGGGGAAGAAGTTCCTTTTGAAGGGGAAAGCATGAAAAGTTCC
AGCCTCATGGCCTCTTGCCTTATTGGGTCAATTTTCTTCGGGGAATCACTTGTGAATCAATGAATAT
CTTTCATTTACCTCTGCCGGGACCCACCCCATGGTTTCAAGGGGNGGCNTT

| | |
|---|---|
| Sequence 521 | cMhvSH105f02a1 |

TGTACTAANCCATTGTGACAGAAACTTNCTTTACCATTGATGAGCTGGAAGAACTTTATGCTCTTTT
NNAAGGCANTAACATCTCACCAGCTGNTACTGGGGCGGGAGCAGCNACNCGCTGGACCGGCATGA
CCCCAGCCTGCCCTACCTGGAACAGTATCGCATTGACTTCGAGCAGTTCAAGGGAATGTTTGCTCT
TCNTCTTTCCTTGGCGCATGTAGGAACTCACTCNTGACCGTTTCANGGCCTTCCGCTTTGTTCCAGT
TTTATTTAGGATNAAAAATNGGAGGACCTCTTTTGGATT

| | |
|---|---|
| Sequence 522 | cMhvSH007h11 |

AGGTACCCGGGATTTNACCANTGTNACTGTGCTAAATGGTTCTGTCTTCCTCAGTGTGATGGAGAA
AGCCCAGAAAATGAATGATACTATATTTGGNTTCNCANTGGAGGANCGCTCATGGGGGCCCTATA
TCANCNGTATTCAGGNNNTATNNGCNAACANTNATNACCNANCCTACTGGNAACTTANGAGTGGA
TTGCCTNNCCCTGGTNCACGCACTGGTAGTCTACGNTGTCCGCAATGGNTNAAAACTTGGAAGTCT
CTTGAGCCCAGGAGGCNATAAAGTCCCAANACTTNCCTNATCTGCCNANTTATACCTTNATGCCTG
GGGCAACACAACNAGACNTGCCNNCTNAAAAAAA

| | |
|---|---|
| Sequence 523 | cMhvSH016e11 |

CCGGGCAGGTACAACACTCTGTCCCTACAAGGGCACAGGTGCCACCTTGAGCAGCTGTGACTATGT
CTAAGGCCATCCGGTTTTGCATCACCACCTTCCTGATCTGATCAAACTCATCAATTAACAAAAGGA
GGGCAGCTCAGGTGTAATTCATGGGCCCAATCTCTGTGTTCTGCAAGGGCTGTAACCTGCATTTCT
ACAGTGATGACACCTGTTCCAGGGACAGTTATTGCTAAGGGGTAGAACCACTAGGGGCTCAATGC
ACTNACAAAAACTGGGAACACAGC

| | |
|---|---|
| Sequence 524 | cMhvSH025e11 |

GGGGCAGGCTTGCCATGGGTTTTGNGACACCCCNATCCAAAGCTCACCATGTTGCATCCCGCCCAT
TGNCTGTGGGACCCCAAGTTTCTAGCCATGTCCAGTTCTTCACAAAAGCTGGATGCACATGCCAAG
GCAAGCCATCCACAGCTGCTGCTGGAAGGGTGGTGCAGATCTAACAGTTGGAGACATTGGCCACC
TCAGCATAGGTGTGAGCCCANTCCACAATGTTGTTGGAGCATGCCAACCTGTGGCTGAGCAAATA
ACTCCCAAGAATTTGGCAGACAATTTTCGGCCCTTGGACCTTGGATTTATTGATGGCCCAACTGCA
CACTGCCAAATGCTGTCACAAGAGGGGCACCACCACTTCTA

| | |
|---|---|
| Sequence 525 | cMhvSH027a12 |

AGGTACGCGGGGAAGCGCAAAAGAAGAAAGATGAGGCAGAGGTCCAAGTAAACCGCTAGCTTGT
TGCACCGTGGAGGCCACAGGAGCAGAAACATGGAATGCCAGACGCTGGGGATGCTGGTACCCGTG
CCCAGGAGGACGCCGAGCTCCAGCCCCGAGCCCTGGACATCTACTCTGCCGTGGATGATGCCTCCC
ACGAGAAGGAGCTGATCGAAGCGCTGCAAGAAGTCTTGAAGAAGCTCAAGAGTAAACGTGTTCCC
ATCTATGAGAAGAAGTATGGCCAAGTCCCCATGTGTGACGCCGGTGAGCAGTGTGCAGTGAGGAA
AGGGGCAAGGATCGGGAAGCTGTGTGACTGTCCCCGAGGAACCTCCTGCAATTCCTTCCTCCTGAA
GTGCTTATGAAGGGGCGTCCATTCTCCTNCATACATCCCCATCCCTTTACTTTCCCAAGANGACCAC
ACCCTTCCTCCCTGGAGTTTTGGCTTAAGCAACAAGANAAAAGTTTTTATTTTTTCTNTTGAANGGG
AAAGGGCTTCTTTTTTCCTTGCTTGTTTTCAAAAATTTAAAAAGG

| | |
|---|---|
| Sequence 526 | cMhvSH029e11 |

AGCTCCACCGCGGTGGCGGCCGAGCTGACGCAAACATGCAGATCTTTGTGAAGACCCTNGNNGGN
NGNNACCATCACCCNNANAAGAAAATCCTTTTGACNCCATTGAGAATGTCAAAGCCAAAATTCAA
GACAAGGAGGGTATCCCACCTGACCAGCAGCGTCTGATATTTGCCGGCAAACAGCTGGAGGATGG
CCGCACTCTCTCAGACTACAACATCCAGAAAGAGTCCACCCTGCACCTGGTGTTGCGCCTGCGAGG
TTGGCATTATTGNAGCCTTCTTCCCCCGCCAGCTTGCCCAGNAAATACAAACTGCGAACAAGTATG
ATTCTGCCGCAAAGTGGCTATTGCTNCGCCTTCACCCTNGTGCCTGTTCAACTGCCCGNAAGGAAA
GCAAAGTTGTTGGTTCACACCCAAACAAACCCTTGCGGTCCCAAGGNAAGTAAANGNTCANAATT
AAAGGGTTGGCNTCTTTTCCTTTTGAAAGGGGACANNNCNCTTCCTGGCCCNCAGNGCNCCCCGNT
GGGCCCCCTGGGNAACCCTTCCAAATTAAAAANNGGNTTCCCTTTTTTCAATTTTGGACCTTGGGA
AGCCAAGNCTTTCTANATAGAANANATNGTATCNNTCACATATTANNATACGNGNTTNCCCTTNG
GGCCCCGATNTTNTTAANAANACCTNAAGTGGGGATTCCCNCCCGGNGCCTTGCGAAGGGAATTT
CNGAAATATTTNAAAAGCCNTTAANTNNGANTTCCCNGGTCCGAACCCNTCCCGAGGGGGNGGGG

| | |
|---|---|
| Sequence 527 | cMhvSH035c08 |

AGATACGCGGGGGAGGAGTGAGCTCTTGGGGTGTCCAGTTGGTTGCCGCGGCAAGTCTCTCCGAG
CAGCGCATTTGTCTTCTAGGCTGCTTGGTTCGTGCCTCCGAGAAAGGGGTCTNCTGCTGCCAGCTA
AGTGTGGGAGAACTTGTGCACGTATCTCCCCTCCGAATCCCAACGATGGGTAACGCCAGCTTTGGC
TCCAAGGAACAGAAGCTGCTGAAGCGGATGCGGCTTCTGCCCGCCCTGCTTATCCTCCGCGCCTTC
AAGCCCCACAGGAAGATCAGAGATTACCGNGTNGTGGTAGTNGGCACCGCTGGTTGTNGGTGAAA
AANTANCTGCNCNTNGGCCGGNCGNTTCTANAACTANTGGANNCCCNGNGCTGCATGAATTCNAT
ATCNAAGCNTTATTTNATTCCCGTCGACCNTNTNTAGGGNGGGGGGACCCGGATNCCCCCAANAA
TTTTTGTTTCCCCTTTTNATTNNAGGGGNTTTAATATNCACCTCCTATNGGGCNNCTNANTCNTTNG
TNCAATTTNCTTGNTCCTCCTCGTTGNTNAAAAATNTTGGATATTATTGTTTCCCCCCCCTNTATGA
NANCNNACNAAAANNNANTNANTTTAANTANTTTTTTTTTTTTTTTTTCCCC

| | |
|---|---|
| Sequence 528 | cMhvSH041f10 |

AGGTACGTCCAAATGACGAAGTCACTGCAGNGCTTGCAGTTCAAACAGAATTGAAAGAATGCATG
GTGGTTAAAACTTACCTCATTAGCAGCATCCCTCTACAAGGTGCATTTAACTATAAGTATACTGCC
TGCCTATGTGACGACAATCCAAAAACCTTCTACTGGGACTTTTACACCAACAGAACTGTGCAAATT
GCAGCCGTCGTTGATGTTATTCGGGGAATTAGGCATCTGCCCTGATGATGCTGCTGTAATCCCCAT
CAAAAACAACCCGGTTTTATACTATTGGAAATCCTAAAGGTAGGAATAATGGGAAGCCCTGTCTTG
TTTTGCCACACCCAGGNTGATTTCCTCTAAAGAAACTTGGCTGGGAATTTCTGCTGNGGGTCTATA
AAAATAAAACCTTTCTTTAACCATGGCTTTCTTCCAAAAANNAAAAATTGTAATNNTANATAAAAA
TAATGGGGNCCCTTGGGCCGCTTCNTANNAAACTTAAGGTGGGGATCCCCCCCC

| | |
|---|---|
| Sequence 529 | cMhvSH044f03 |

AGGTACGTCCAAATGACGAAGTCACTGCAGTGCTTGCAGTTCAAACAGAATTGAAAGAATGCATG
GTGGTTAAAACTTACCTCATTAGCAGCATCCCTCTACAAGGTGCATTTAACTATAAGTATACTGCC
TGCCTATGTGACGACAATCCAAAAACCTTCTACTGGGACTTTTACACCAACAGAACTGTGCAAATT
GCAGCCGTCGTTGATGTTATTCGGGAATTAGGCATCTGCCCTGATGATGCTGCTGTAAATCCCCAT
CAAAAACAACCGGTTTTATACCTATTTGAAATCCTAAAGGGTAGNAATAATGGGAAGCCCTGGTCT
GTTTTGCCACACCCCAGGTGGATTTTCCTCTAAAGGAAACTTGGCTGGGAATTTCTGCTGTGGTCTA
TTAAAAAATAAAACTTCTTAACATGCTTTCTCCNAAANAAAAAAAGAGGNNAAAAAATATACAAA
GGGTTACCTTNGGGCCGGNTNTTAANAAACTAAGNGGGAATCCCCCGGGGCCTTGGCAAGGGAAA
TTTCCGATNNTTCCAAAGGCTTTATTCCGAATACCCCGGTTCGGAACCCCTTTCGNAGGGGGGG

| | |
|---|---|
| Sequence 530 | cMhvSH053f04 |

TCCACCGCGGTGGCGGCCGCCCGGGCAGGTACTCGGGGAGGCTCCTGGGGTGGNNTCCAAATCAC
TCATTTGTTTGTGAAAGCTGAGCTCACAGCAAAACAAGCCACCATGAAGCTGTCGGNGTGTCTCCT
GCTGGTCACGCTGGCCCTCTGCTGCTACCAGGCCAATGCCGAGTTCTGTCCAGCTCTTGTTTCTGAG
CTGTTAGACTTCTTCTTCATTAGTGAACCTCTGTTTCAAGTTAAAGTCTTGCCAAAATTTTGATTGC
CCCTTCCCGGGAAGCTGTTGCCNGCCAAGTTTAGGGAGTTGGAAAGAAGATTGCACGGGATCAAG
ATTGTCCCTTTCANGAAANNGAAGGCCTCATTTTGGCCGGGAAGTTCCTTGGGTNGAAAAAATNAT
TTTGAAANGAAAAATGGTTAAGNTNGTTGNTGGNACCAATTGGTTAAAAAAANACCTTTTTCCAAT
CCCCCTNGGGTTTTTCNCAACTTGGNTCCTTTTTCAAATTNGAACAACCCCCTTGGATTCCTTTCAA
CCTTGGCCANGAAAAATGGTTNAANAAGGGGTTTTTCCAAANCGGTTCTTTTGGCTTTTTAAAATT
AAAAANTCCACCTTTNGGCCTTCTTTCCCCCNAGATGAANTATGGAAACAANNAAGAAAATTTACT
NTNTTNTNTANNAANGNNGGTTTCCCCTTNTGGGTCCCGNTTTNTTANANGAANCNTTANTGTTGG
GANTCCCCCCCCCNGGGGCNTTGGNNAAGGGNAAATTTNTNGAATATTNCAAAGGCTTTTATTCCG
ANTANCCNGGGCNCTACCCCTTCAANGGG

| | |
|---|---|
| Sequence 531 | cMhvSH054g02 |

AGGTACAAACCCAGTTTGTTTTCAAAAAATCACAGNGNGCAATGCAACTCATNACTNTATAAAAG
CAAGCTTAGGCTACCTGAAAGATTTTCCCTTGGAAGTTTAGCGTATGTTTGACTAACAAGAATTCC
CTACATCAGAGACTCTAGGTGCTATATAATCCAAAAACTTTTCAGCCTGTTGCTCATTCTGTCCCAT
GCTGGCAATAATACCTTGTCAGCCCTTTACCCTTATTTTGGAATTGCTCCATCTCCTGGTGGGGACT
TGGTATCTTGTCTGCCATATCAGNAACACAATACCCCTGAAGGAGGTTCTGATTTGATTTTTTTTTT
TTTCTTCATGCCTACCCTTTTTTTGGGAAGTTTTCCAGCNCGCCAATTTTTGAAAATTGAAAAATTG
ACAAAGGGTGGTANTATTTTGGNTTCCAAATTTTGTCAATTTTCCCCAACCCATTTGGCAATTTTAC
CAAACCCTTTCTTTAAACCTTTAAAAATGGGGGGTTAAACCCCCCTTAAAGGGCCAATTNTTTCAA
AAAANNAAAGGCNANGAACNTTGGCCANTTGAAATTANAAAACCGGGGAAAANTNTGAAAAAAA
AAAAANGGAAACCCTNANCCATTTTTTATTTTTTTGNCNTTTTTAAAGCCANTTCCCTTTNACTTTT
TTNAACCCCTTTTTTATTGAAGAAATTTGGAAGAAGTNGGGAACNTTTACAATTTTTCCCNTTTTTT
TTTAACCATTTTTTTCCGNAATACCTTANNTTTTTTTT

| | |
|---|---|
| Sequence 532 | cMhvSH054h05 |

CCGGGCAGGTACCCGTGCCCAGGAGGNCGCNGAGNNCCAGCCCCGAGCCNTGTTNNTTTTACTCT
GCCGTGGATGATGCCTCCCACGAGAAGGAGCTGATCGAAGCGCTGCAAGAAGTCTTGAAGAAGCT
CAAGAGTAAACGTGTTCCCATCTATGAGAAGAAGTATGGCCAAGTCCCCATGTGTGACGCCGGTG
AGCAGTGTGCAGTGAGGAAAGGGGCAAGGGATCGGGAAGCCTGTGTGACTGTCCCNCGAGGAAC
CTCCTGCAATTCCTTCCTCCTGAAGTGCTTATGAAAGGGGCGTCCCATTTCTCCTCCATACCATCCC
CATCCCTCTTACTTTCCCCAGTAGGGACCCACACCCTTCCTCCCTGGGAGTTTTGGCTTTAAAGNCA
ACAAGATNAAGGTTTTTTATTTTTCCTCTGAAAGGGGAAAGGGCTTCTTTTTNCCTGCTGGTTTTCA
AAAAAAATTAAAAANG

| | |
|---|---|
| Sequence 533 | cMhvSH055b06 |

GGAGCTCCACCGAGGTGGCGGCCGAGGTACGCGGGAACATCAAACTGTTAATCGAATGCAGGCTC
CAGGGAGAAGCAACTTCCTGGGTATGCGTGTTAAGAGACAAAAAATGATGACGTTTGATGACCAC
TCCACCAGAAAAGGGAAGAAAGCCTGAGGGGACTACGTGGACCTCCCTAAACACACTGCGCATGC
TCCATTCCAAACGGTATGGCGAGCACTGCGCATGCGGGAAACCCACCCTGTAAGGGAAGAATCCT
GGGAAAGAGGCGAGCCTATGAAGTCCCAGGATCAAGGTTAGAGACCCTTTTTTTACTGTCTTCTTG
TGCTCTCTTTTCTCTCTTGGACCTTCAGGCGCCTGCTTGGGTCTCTTTCAAGCGAATTTTGCTTTCTT
TCCTGNTCTAAAGCCTTTTAACTAAAC

| | |
|---|---|
| Sequence 534 | cMhvSH055b06 |

GGAGCTCCACCGAGGTGGCGGCCGAGGTACGCGGGAACATCAAACTGTTAATCGAATGCAGGCTC
CAGGGAGAAGCAACTTCCTGGGTATGCGTGTTAAGAGACAAAAAATGATGACGTTTGATGACCAC
TCCACCAGAAAAGGGAAGAAAGCCTGAGGGGACTACGTGGACCTCCCTAAACACACTGCGCATGC
TCCATTCCAAACGGTATGGCGAGCACTGCGCATGCGGGAAACCCACCCTGTAAGGGAAGAATCCT
GGGAAAGAGGCGAGCCTATGAAGTCCCAGGATCAAGGTTAGAGACCCTTTTTTTACTGTCTTCTTG
TGCTCTCTTTTCTCTCTTGGACCTTCAGGCGCCTGCTTGGGTCTCTTTCAAGCGAATTTTGCTTTCTT
TCCTGNTCTAAAGCCTTTTAACTAAAC

| | |
|---|---|
| Sequence 535 | cMhvSH058f12 |

GGTGGCGGCCGAGGTACGCGGGGAGGCTCCTGGGGTGGNGTCCAAATCACTCATNGANAAGAGA
AANCTGAGCTCACAGCAAAACAAGCCACCATGAAGCTGNCGGTGTGTCTNCTGCTGGTCACGCTG
GCCCTCTGCTGCTACCAGGCCAATGCCGAGTTCTGCCCAGCTCTTGTTTCTGAGCTGNTAGACTTCT
TCTTCATTAGTGAACCTCTGTTCAAGTTAAGTCTTGCCAAATTTGATGCCCCTCCGGAAGCTGTTGC
ANNCAAGTTAGGAGTGAAGAGATGCACGGATCAGATGTCCNTTNAGAAACGAAGNCTCATTGCGG
ANGTTCCTGGTGAAAATAATTTGAAGAAANNTTTTGTNGAGACCATGTNANNAACTTTTNATCCTG
GTTTCCACTGNNTTTTCAATGACACCCTGATCTTCAACTGNAGNAATGTTAAGGTTTTCAACTGTTN
TTTGNTTTTAATAAAATTCACTTTGCTCTTCCAAAANNNAAATATTTNGTTTTTTTCCCNCCCCTTAC
TTNTAGNGTACCCTGCCCCGGGCCGGGCTCCGNTTTTTAANAACTTAGNGGGGNNTNCCCCCCCGG
GGCCTGCCAGAGGAAATTTTNTATTTTAAAGCCTTTANTCCNTNNCCAGGCNGACCNTNGNGGGG
GGGGGGCC

| | |
|---|---|
| Sequence 536 | cMhvSH058g12 |

CCGGGCAGGTACTCGNGGGGCAAGGTCATCCCTGAGCTGAACGGNAAGCTCACTGGCATGGCCTT
CCGNGTACCCACTGCCAACGNGTNAGNGGTGGACCTNACCTGCCGTNTAGAAAAACCTGCCAAAT
ATGATGACATCAAGAAGGTGGNGAAACANGCGTNNNAGGGCCCACTCAAGGGCATACTGGGCTA
CACTGAGCACCAGGTGGTCTCCTATGACTTNAACAGCGACACCCACTCCTNCACCTTCGACGCTGG
NGCTGGNATTNNCCTNAACNACCACTTTGNCAAGCTCATTTNNTGGTATGACAACGAATTTGNCTA
CATGCAACAGGGTGGTGGACCTGANGGCCCACATGGCCTNCAAGGGAGTAAGACCCCTGGACCAC
NGGCCCCAGCAAGAGCCCANGACGNAGAGAGAGACCCTCACTGCTNNTGAAGGGCGTGCCACAC
TNAGTTCCCCANCAAACTTGAATTNTTNCCNTTCTCACAGTTTGCATGTAAACCCCTTGAAAAGGN
GANGGGTNTAAANGAGCCNTACCTTTNTNATTTTNCCTTTNGGCCGGGTTTTAAAANTAGGTNNGA
TTCCCCCGGGCCTTNGAANGAANTNNTAATTTTCNAACCTTNAACCGAATTCCCGGNTTGNNCCCT
AAAAAGGGGGGGGGG

| | |
|---|---|
| Sequence 537 | cMhvSH060g10 |

AGGTACAAACCCAGTTTGTTTTCAAAAAATCACAGTAGCAATGCAACTCATCACTCTAGAAAAGC
AAGCTTAGGCTACCTGAAAGATTTTCCCTTGGAAGTTTAGCGTATGTTTGACTAACAAGAATTCCC
TACATCAGAGACTCTAGGTGCTATATAATCCAAAAACTTTTCAGCCTGTTGCTCATTCTGTCCCATG
CTGGCAATAATACCTTGNCAGCCCATTACCCTTATTTTGAATTGCTCCATCTCCTGGGTGGGGACTT
GTNATTCTTGGTCTGCCATATCAGGAACACCAAACCCCTGGAAGNAGGTTCTGCATTTGGATTCTT
TTAGGTGGGGNTCTTCCANGGCCTTACCCCTTTTTTTTTGGGAAAGTNTTCCAGGCCCGCCAATTTT
TGGAAAAATGNAAAATGGACCAAGGGNGGTATNTTTTTCGGAATNCAAATTTTTTCCATTTTCCCA
CCCAATTTGGCCATTTACCAAACCCTTNTTAAACTTTAAAAATGGGGGTTAAACCCCTTAAAAGGG
CNATTAATTCAAAAAAGAAAAGGCCAGGGACNTTGCCATTGTAATAAAAAACCGGGGAAANTTAN
GANAAAAAAAAAANGAAAACCCTTACCAATTTTAATTTTTNG

| | |
|---|---|
| Sequence 538 | cMhvSH062c09 |

AGGTACGCGGGATCAATGACATGGTCACGGAAGGCAAGTNGGNTGACTTCAACGGAANNANTATC
TCCTTNCTNAACTGGGACCGTGCACAGCCTAACGGTGGCAAGCCGAGAAAACTGTGTCCTGTTCTC
CCAATCAGCTCAGGGCAAGTGGAGTGATGAGGCCTGTCGCAGCAGCGAAGAGGTACATATGCTNA
GTTCACCATCCCTCAATAGNGTCTTTCTCCAATGTGTCCTCCAAGCAAGATTTCATCATTAACCTTA
TAGGGTTTCATGAANCTCTAAAGGATCAAAGGTTAAAAAATTCATAAAATTTTTTTACTTTTATTTA
AAAAAAAATTTGCCAAACCACCAAAAGGAATCAAATTGGTTCCCANTTAGGCCANAATTAATNGG
AATTAGGCAATTCAAGGCCCAAAATTTTTTTTGGCCTTAAAACCACCAATTTTTTCTTTTTTNGGGG
GAATTTTTTTGGCCCCTTTNCCCTTGGGGGGGTTAAATAAAGGGGGGGAATTNCAAGGAAAAAATT
ATTTTGGAATNCCCNATTGTTGCCCACCCGCCCAGAAATTNAAAAAAATGGGGNCTTTTNTTGNCT
TAAAAACCAAGGACCTAAAAAAAATCCCTTTTNCTTNCTCTTANGNCCCNTTTTCTTCAACCTTTTG
GTNNCCCCTGGCCCCCGGGGCCCGGGNCCCGCCTTCTTAAGAAACCTTNAGGTTNGGGAAATCCCC
CCCCCNGGGNCCTTNGTNANNGGGAAATTTCCCCANANTTCAAAAGGCCTTTAATTCGAAATACCC
CGGTTCNGAACCCCNTCNTAANGGGGGGG

| | |
|---|---|
| Sequence 539 | cMhvSH063c04 |

AGGTACAATCTANTTAAACAAGCAGAATAGCACTAGGCAGAATAAAAAAATTGCACAGACGTATG
CAATTTTCCAAGATAGCATTCTTTAAATTCAGTATNCAGCTTCCAAAGATTGGTATGCCCATAATA
GACTTAAACATATAATGATGGCTAAAAAAAATAAGTATACGAAAATGTAAAAAAGGAAATGTAA
GTCCACTCTCAATCTCATAAAAAGGTGGGGAGTAAGGGATGCTAAAGCAAAATAAATGTAGGTTC
CTTTTTTTCTATTTCCGNATTATCATGGCAGNCTGCTTCTTTTNGATAATGGCCTNAGGGGTTACCC
CCATTTTTAAGNTTTAGGAGGGNTTNGNAAATTGCCAAATGGTNGGGGAAATGAAAAAATTTGGA
ATTCAAAATATTTACCACCCTTTGNTCAATTTTTCCATTTTTCAAAAATTTTGGCCGGGCCTGGGGA
AAAACCTTTTCTNCAAAAAAAAAAAAAGGGGGTTAAGGGGCCAATTGNANCGNAANAATAAACA
CNTNNTATNTTNGTTNCGNAAATTNCATGAAAACNCTTTCTTNTCCAAGGGGGGGNT

| | |
|---|---|
| Sequence 540 | cMhvSH071c06 |

AGGTACGCGGGGCCGGGCGCGGTGGCGCGTGCCTGTAGTCCCACCTCAGCCTCCCATCCTTGTCTA
CCTAATTAGGCTTTGTGTAACTCAGTGTTGCAAAGCTTTTGACATCTGTTTGAGTTAATGTTTATAT
ATGTTGTTACTTAAGGGTTTCACATTAAATTTAAACATACTTATATTTTATAACCAAACAAGTCATA
TTGGGGCATACTCATTAGGATTGAGTGCTTTCTTACACCAAAATACATGTATACAAAAGATTTAAA
ACACTTTTCGGCCCGCTCTTAGAAACTAGTGGGATCCCCCGGGCTGCANGGAATTCNGATATCAAA
GCTTTATCCGAATACCCGTNCGACCCTCGGAGGGGGGGGGGCCCCGGTACCCCAGCCTTTTTGGTT
CCCCTTTTTAGTNGAAGGGGT

| | |
|---|---|
| Sequence 541 | cMhvSH073b05 |

ACCGCGGTGGCCGGCCGANGTACCATCTTNCGAGATACTNATTCACGTCAAAATNCTCCTGCACCG
GAGGATNGGGGCACTTCCCAAGATGAAATGCTTGTCCCTCTGCCGCACCGAAGAGGCCAGCCAGT
GCGGAAAGCAGCAGCAGCAGCATCACCATCTTGGGGCTGGGTGGCTGGAGAAGGAACCTGGAGCT
TTTCTTTCAAGATGAAGGCANGTTNTCCAGATGCANAATCAGCCCGATTTGAGATGCCTGTCTTGG
TGACCTGGCCTCTCCCAAGCTCCCCGCGATACCTGCCCGGGCCGGNCGCTCTTAGGAACTAGTTGG
GAATCCCCCCGGGGCCTGCAAGGGAAATTTCGGAATATACANAGGCCTTTATCNGATACCCGTTCG
ACCCTNNGAGGGGGGGGGGCCCCCGGGTTACNCCAAGCTTTTTTGNGTCCCCCTTTTTAAGTGGAG
GGGTTTAAATTNGCGGCCGCCTTTGGGCNGTAAAATCAATGGGTNCAATAAGCCTGGTTTTCCCTG
GTGGATGAAAANTTTGGTTAATCCCCGCTTCCACNAAATTTTCCCACCACCAAAACCATAACCGGA
AGCCC

| | |
|---|---|
| Sequence 542 | cMhvSH073f04 |

CCGGGCAGGTACACAAGAGTTTGTCAGACAAATAAAATAAGAATACTTCACACACGTATCAACAC
CATACAAGGCATTATTCTTCACACAGTAACATCTAATGTGTTCTTTTATTTTTGAAACAGCAGGAA
AAGAGCCCTTTCCCTTCAGAGGAAAATAAAAACTTTATCTGTTGCTTAAGCCAAACTCCAGGGAGG
AAGGTGTGGNCCTCTGGGGAAAGTANAGGGATGGGGATGTATGGAGGANAATGGACCGCCCCTTC
ATAAAGCACTTCAGGGAGGAAGGAATTGCAAGGAGGGTTTCCTNGGGGACAGNTCACACAGANTT
NCCCGATCCTTGCCCCTTTCCTTCACTGCCACCACTTGCTTCACCGGCCGTCACACCATGGGGGGAC
TTGGCCCATTACTTTTCTTTCTTCAATAAGAATGGGGGAAACACNGTTTTTACNTCTTGGAGCCTTT
TTTTTCAANGACTTTTCTTTGGCAANNCGNCTNTCGAAATNCAGCTTCCTTTCTTCGNTGGGGGAAG
GGCCAATTNNAATTCCCACCGGGNCANGGANNTTAGNAATTGTCCCAAGGGGGNCTTCGGGGGGG
CNTTGGGGAAGCCTNCGGCCGTTCCCTTCCTTGGGGNCAACGGGGGTTAACCCTTTCGGGCCCCGG
TTTCTTAAGAAAANTNAGTGGGGAAATCCCCCCCCCNGGGCCTTGGCCAANGGGAAATTTCNGAN
TNNTNAAAGNCCTTNATTCGGAATAANCCCGNTNCCNNACCCTTNNAANGGGGGGGGGGGCCC

| | |
|---|---|
| Sequence 543 | cMhvSH074c08 |

AATTGGACTCCACCGCGGTGGCGGCCGAGGTACAGAACCCGACCAAAGTAGGCTGGTGAGGAAGT
CCAGGCTCCAGGGGAACAGACGCTGCCCAGTGTTCATAGCTTCCTGCAACTTGACAGAGCCTGAGT
TTGCCTCTTAGTGGGAGAATGAGAGAGAGCTGTAGTGTCACCTGACATTCCCCAAACCTTGTGAAG
CACGTTGGCCTAAGTGTGCCGTGATCCCAGCCCACACTAGCCTGGGTGCATCTGCTAATGGGAGAC
CAAATCTTTGTCCCGGGAAGCAAGAAGTGGGTGGGGAGTAATCGAGNCGGCCCGCCCGGGCAGGT
ACNGCGGGGATGATTCTGAGGGAGCCGGTGAAGCCACCCACCAGGGAGGCATGAAAAATGNAAA
AGGGACAGNGGCCTGACCAGACAGTCCTTGACAAGAGGNACGAAGAAAAAAAAGAAACTCGAAA
AACTTGGCCTGCAATGGGATTTGGGAACTACAGGAAGGATAAGCTTGAGAAAATTCAGCCCAAAA
GGGGGCTTGACTGTCATTTGGNAGCCGGTGGGCACTTGTTAAANGAAGCCAGCCCATCACCATTG
ATCCTGTTTTTTCACCACTTCACTTGGAAAGGACACCATTTTTATATACCCCAAGGGGGCGGGAAA
AGTTAAAAACTTTACTATTTTCATTTAAAATGTTTTGACACCAATTTGGGAAATTGGTCTTTTTAA

| | |
|---|---|
| Sequence 544 | cMhvSH090b03 |

AGGTACCCNGGGACCAGTANNTTGGNANACANTGCCTTCTGTNTTCTCGNGNGNGCNCTTGCTCCA
NNTNCTGTTCANGGCCAGCCNTGGCACCCTGCTCCTGGTTCTNTGCCTGCANTTGGGGGCCAACAA
AATGCTCAGGACAACACTNGGAAGATCATAATAAAGAATTTTGACATTCCCAAGTCANTACCTGN
CAG

| | |
|---|---|
| Sequence 545 | cMhvSH090b03 |

CTCCCACACTTTTGTATCCCTTTAACATAGGGACTAAATGCTCCCNTTGGTCGTAAANCATGGGGT
CATATTCTTGTAATCATGTGGGCTTTTCTTTTACTTAAATTTTGATCCTTGATTTCTCCTTGCCTCTTC
TTGTAGTCCAATGCTGATCTCTGTTATGGGGCGTT

| | |
|---|---|
| Sequence 546 | cMhvSH101a06 |

CCGGGCAGGTACGCGGGAGGGTGGCCCAACTGGACCAGCTCCTNNACTACAGGAAGAAGTCAGCT
GANTTTCCAGACTTCTATGATTCTGAGGAGCCGGTGAGCACCCACCANGAGGCAAGAAAATGAAA
AGGACAGGGCTGACCATACAGTCCTGACAGAGGACGAGAAAAAAGAACTCGAAAACTTGGCTGC
AATGGATTTGGAACTACAGAAGATAGCTGAGAAATTCAGCCAAAGGGGCTGACTGTTCATTGGAG
CGGTGGGCCACTGTTTAANAAGCAGCCATCACATNATCTGTTTTTCCACCACTTCACTNNAAAAAG
ACACCCATTTATATACCCCAAGGGGCCAGGAAAGTAANAACTTACTATTTCATTAAAATGTTTGGA
CCACCAATTTGGGAATTGTCTTTTAATTTTCTTGTCCAAGAAATGGCTTATTTGGAAAAATGTGAAA
TTGCCATTGGACTTTNGTAGCCATNATTTTCTTTTTTCTGCCAAAAATTATGACCATTNATTTANAC
CNTTGGCCTTTATTGACCAAATTNAACCNTGGTGCCTTAACTTGGCCTTTTTNGGGGAAAAAAAAT
GTTTTTGGTTCCTTTAAAATTTNGGGAAAA

| | |
|---|---|
| Sequence 547 | cMhvSH110a11 |

AGGTACAAACCCAGTTTGTTTTCAAAAAATCACAGNAGCAATGCAACTCATCACTCTAGAAAAGC
AAGCTTAGGCTACCTGAAAGATTTTCCCTTGGAAGTTTAGCGTATGTTTGACTAACAAGAATTCCC
TACATCAGAGACTCTAGGTGCTATATAATCCAAAAACTTTTCAGCCTGTTGCTCATTCTGTCCCATG
CTGGCAATAATACCTTGTCAGCCCATTACCCTTATTTTTGAATTGCTCCATCTCCTGGTGGGACTTG
TATCTTGTCTGCCATATCAAGAACACAAACCCCCTGAAGAGGNTCTGGATTTGGATTTTTTTTNTCT
TCATGCCTACCCTTTTTTTGGAAGTTTTCCAAGCCGCAATTTGGAAATGGAAATGGACAAGGGTGT
ATTATTTTGGATCCAAATTTTTCATTCCCCACCATTGCATTACCAACCTTCTAACTTTAAAATGGGG
TAACCCCTTAAANGGCCATTATTCAAAANGAAAGCCAGNACTGCATTGAATAAAACCGGNAANAT
TAAGAAAAAAAAAAGGAACCCTACCATTTTTATTTTTTGGGCTTNTAGCCAATTNCCTTTAACTCCT
TAAACCTTTTTTNNTNGGAAGAATTNGGAGAAGGNGGGGACCTTTNACCAANTTTNCCNCTTTTNT
TTAANCATTTTTNCNTNTATNNNCCTTANTNTTTTTT

| | |
|---|---|
| Sequence 548 | cMhvSH110a11 |

AGGTACAAACCCAGTTTGTTTTCAAAAAATCACAGNAGCAATGCAACTCATCACTCTAGAAAAGC
AAGCTTAGGCTACCTGAAAGATTTTCCCTTGGAAGTTTAGCGTATGTTTGACTAACAAGAATTCCC
TACATCAGAGACTCTAGGTGCTATATAATCCAAAAACTTTTCAGCCTGTTGCTCATTCTGTCCCATG
CTGGCAATAATACCTTGTCAGCCCATTACCCTTATTTTTGAATTGCTCCATCTCCTGGTGGGACTTG
TATCTTGTCTGCCATATCAAGAACACAAACCCCCTGAAGAGGNTCTGGATTTGGATTTTTTTTNTCT
TCATGCCTACCCTTTTTTTGGAAGTTTTCCAAGCCGCAATTTGGAAATGGAAATGGACAAGGGTGT
ATTATTTTGGATCCAAATTTTTCATTCCCCACCATTGCATTACCAACCTTCTAACTTTAAAATGGGG
TAACCCCTTAAANGGCCATTATTCAAAANGAAAGCCAGNACTGCATTGAATAAAACCGGNAANAT
TAAGAAAAAAAAAAGGAACCCTACCATTTTTATTTTTTGGGCTTNTAGCCAATTNCCTTTAACTCCT
TAAACCTTTTTTNNTNGGAAGAATTNGGAGAAGGNGGGGACCTTTNACCAANTTTNCCNCTTTTNT
TTAANCATTTTTNCNTNTATNNNCCTTANTNTTTTTT

| | |
|---|---|
| Sequence 549 | cMhvSH119h04 |

AGTTTCAGAACGACGGANAGCTCCCGCGTGAGGCTGCTGCCCCTCCTGGGCGCCGNCCTGCTGCTG
ATGCTACCTCTGTCGGGTACTTGNTTTTTTTTTTTTTTTTTTTTTTTTAAATTTGTTCACTGACCAACT
GGTTGTTCAGGAGCNCGTTGTTTAATTTCTGGATATTTATGAATTTTCTGAAATTCCNCCTGATTGA
TTTCTAGCTTCAAACTGAAAATATATTTGATATAATTTCTATCTTTCTTAATTTTACTGAGGCTTGTT
TTGTTTTCTAACATATGATCTATCCTGGAGAATATTCCATATGCAATTGAGAAAAATGNGCNTTCT
GTTGTTGGATTGAATATTCTGGATATATCTACNAGTCTTTTTAGAGTTANATTACTACCTTTCTCTG
TTCTCATCTTAACATCATCATGATGGACATTTTTATTTCATGATCAATGGATTTTCTCTCATCAAAT
AAA

| | |
|---|---|
| Sequence 550 | cMhvSH001c09 |

NCCGGNCAGGTACTCACTATGTGAAGTCTACCAAGCTCGTGCTCANGGGAACCAAGACGAATAGT
TAGAANAAAAAGAGCATNAAAAATAAAAAAAANANAAAAAGTACTCTGCGTTGNTACCACTGNT
TCCCGGGACTCTGCNNTGTTACCACTGNTTNCCGGNACTNTGCNTNGNNACCACTGGTTCCCGGGA
CTCTGAGTTGATACCA

| | |
|---|---|
| Sequence 551 | cMhvSH001g03 |

CCGGNCAGGTACTNNTTTTTTTTTTTTTTNTTTTNGACTATTTATTCACTATGGCAATTCCAGTGCCT
TGAGTGATGCCTGGCTTATCATGGGAGCTCANCACATAACAAATGCATACATGAATACGGATTCTC
CCTCTCACCCCAATCCCTTGGGATATGCTCTANTATCCACTGACTCCTACTCTCCTGGCTGCCTGNA
AAGGTAGGCATGCCCACCGATGTCGCTGANCAGCATGACCTTGGTGTTGGCAGGGANGTNCTGCT
TGAAGACTGGACGCTGCTCCTCTCCNATTAGTGTNTNGGGGTGCCCAAAAACATCCAACACNTTGG
CAGGTGNCGGNTCAAACAAATGAAACCAACCTTTAGCANTAACTGNCACAAACAGGTTCTTTCCTT
TATTACACACGTNCCCAACNCCAACGCAAGTCAGCATTCCCTGGCAGGAACAGGGTGAACCAAGG
GCCCGACTGTCATCATTTTTTATACACAGACACCTTTCCCGCTGGTGTNTNCCACCACCAGGTTCNT
TTAACGTATCGNTATTTAACNGTTTCCTAGGCAAAATTGCTTNCCGGGAAAGAAAGCTTTNCTGNT
TGAAATTTCANNNGGCCACGCCGCTTGAACGTAAGCTNAAATTGAACNTTATGGGGCACCTTCCA
ANNAAACCAAANGGNNGCCGGNAAGGCCCCCAAAAAAAAANTTTNCCTTGAAACCTTTCNGGNG
GGGAANCCCCCCGNANANCTTGGGCCCGTTTTNAAAAAAANTGGGGAATCCCCCNGGNGNNNGG
GGGAAATTCCNANANAAAANGGTTTTNTAAANACCCNGGNAACCCTTTTANGGGGGGGGCCC

| | |
|---|---|
| Sequence 552 | cMhvSH002e04 |

AGGTACTGGAGGCATGTGCCAACACACCTGTCTAATTTTTGNGNTTTTTGTAGAGACAGGGAAATC
ACTAACAGTTACTCTNNATAACTACTTGTTAAGTTAACCTACNAATNAAAAATGGCATGAAGCTTT
TACTGNCGGGGGGAAGTTTTCANATGTTACTACAACNTTAAGCCCAATACCTTGNGAGAGAAACC
AACATANATTGCACACANANCTTATTTGCAAAGTGCATATGGTCTAAGAGGCGATAGGATATGCA
AAATAACCATAATGTAGGATAGAAAATAAGGATGTATTAAGGAGCACACATGAAATCCTATTANA
GTTAAGAGAAGGTAGATAGAGCTCACTTGTTTTCAGATGTGGTGGTTCCTAAATCTTGAGACAGGA
GAAAAATAGATNGGCTTAGGGAT

| | |
|---|---|
| Sequence 553 | cMhvSH004g06 |

AGGTACTTTTTTTTTTTTTTTTTTTTTTTTTTTTTTTTTTTTTTTTTTTTTTTTTTTTTTTTTTTTNGNNTT
TTTTTTTTTTTTTTTTTTTTTTTTTTTTTTTTTTTTNTTTTTTTTTTTTTNNNTGGAAANCANATTTTTTT
TTAAAANNAAAACCNTNAANCNNTCCCNTTNTACCANAAAAANNNGGGNGGCTTTAAAAAAAAN
GGNAANCCNCAAAAAANNTTTTNNATATNCCNNANNAAAAATTTTNNAAANTTTCCNACAAAAAT
TTCCNAATAANNNGNNTTTTTTTAAAAANNAAANTTTTAGNGGGGNNNTTTTCCNCNCAAAANGT
NGTGTTAAAAAATTTTTNANNGGGNCNAAAAATTNGGNAAAANTNAATATTNTAAANNGGTGTTT
ANAAAAAAAAAAAAAANTTANAAAAANCNAAAAAAAAAAAAAGAAGGGNGAAAAANATAAAAA
TTTTNACC

| | |
|---|---|
| Sequence 554 | cMhvSH008f02 |

AGGTACTNGGGGTTGNTTAGCAGAGGCCGGAAGCGGTGGTTTTTAGCGGCTCTCTGGGTAGCAGG
GTGGTGTGATAGCGGCAGCGAGGGGCTCGGAGAGGTGCTCGGATTCTCGTAACTGTGCCGGGACT
TAACCACCACCATGTCGAGCAAAAGAACAAAGACCAAGACCAAGAAGCGCCCTCAGCGTGCAAC
ATCCAATGTGTTTGCTATGTTTGACCAGTCACAGATTCAGGAGTTCAAAGAGGCCTTCAACATGAT
TGATCAGAACAGAGATGGTTTCATCGACAAGGAAGATTTGCATGATATGCTTGCTTCATTGGGGAA
GAATCCAACTGATGAGTATCTAGATGCCATGATGAATGAGGCTCCAGGCCCCATCAATTTCACCAT
GTTCCTCACCATGTTTGGTGAGAAGTTAAATGGCACAGATCCTGAAGATGTCATCAGAAAATGCCT
TTGCTTGCTTTGATGAAAAAACAACTGGCCCCATACANGAAGATTACTTGAGAAAAGCTGCTGAC
ACCATGGGGGGATCCGGTTACANAATNANGAAGTGGGATGAACTGTACCCTTGCCCCGGGCCGGN
CGTTTTANAAACCTAGNGGGATCCCCCGGGCCTGCCAGGGAAATCNAANATTAAAACCTTATTTG
GATNACCGNTNNACCTTTAAAGGGGG

| | |
|---|---|
| Sequence 555 | cMhvSH016d01 |

ANCTCCGCNGGCGGNGCNCCCGCGGCAGGGACACACGAGCATCAAGGNAACAGGNCTGAGGANN
NNAAACGACTNTGTNATNAGANNNNAGAANNAATATTGCTCACACCTGCTACACCTTCTTGGGAG
CCAAGGGAAGCCTTTTCTGCAATCNCCCCATTTTGATNNAANCTNATCANCNATGGCTTGGGCNAN
CAAAATATTTAAAGGTCTNTTTCCCANCTCTTNCACTTATCTACTACATAAGGCTATAGCAATTAA
AAAGTCTTTCCTTTCCTGCCGCCGTACCATGGGTCCNNCTTGGGTAGCAACTTAGTGG

| | |
|---|---|
| Sequence 556 | cMhvSH021c01 |

AGGTACGCGGGGTGGCGAAACGCTGTCTCTACTAAAACTACAAAAATTAGCTGGGCGTGGTGGCG
CGTGCCTGTAATCCCAGCTACTCGGCAGGCTGAGGCAGGAGAATCGCTTGAACTGGGGAGGTGGA
GGTTGCAGTGAGCCGAGATCACACAACTGCATTCCAGCCTGGGTGACAGAGGGAGACTCCGTCTC
TAAAAAACAACCCCCCCCCCCCAAAAAAAAAAATGCATANCAAGCTGTAATGCTCTTTGTGTTTTA
GAATANTAGAGGTCTGGAAAGTTGTTTGCTTTTCCCCAGTTTTTTTTTGCTGTGTTACCTCTGAAGG
GAATTGAGGTAGAGGGGAGAGTTAGAAGGAATATTCGGCTTTTCTATTTTATATCCTCCTAGGTGA
AATTTTTACAACAAACATGTACCTGCCCGGGCGGCCGAGGTACTTTNTTTTTTTTTCTTATTTGCNN
NCCACTTTTTGNATTTGGNAAT

| | |
|---|---|
| Sequence 557 | cMhvSH027e11 |

CGCGGTGGCGGCCGCCCGGGCAGGTACGCGGGGATAGCCGTTTGAGGGAAGAAGGAGGAAAATT
ACCCGGTATCGTTAGAGCTACACCAAAATTGCATTGAGCCAAACTTGCCACCAAGAGCCCAACAA
TCACCATGATGCTGAGCACGGAAGGCAGGGAGGGGTTCGTGGTGAAGGTCAGGGGCCTACCCTGG
TCCTGCTCAGCCGATGAAGTGATGCGCTTCTTCTCTGATTGCAAGATCCAAAATGGCACATCAGGT
ATTCGTTTCATCTACACCAGAGAAGGCAGACCAAGTGGTGAAGCATTTGTTGAACTTGAATCTGAA
GAGGAAGTGAAATTGGCTTTGAAGAAGGACAGAGAAACCATGGGACACAGATACCGTTGAAGTA
TTCAAGTCTAACAGTGTTGAAATGGATTGGGTGTTGAAGCATACAGGTCCGAATAGCCCTGATACT
GCCAACGATGGCTTCGTCCGGCTTAGAGGACTCCCATTTGGCTGTAGCAAAGGAAGAGATTTGTTC
AGTTCTTTTCAGGGTTGGAAATTGTGCCAAATNGGGATGACACTTGCCAGTGGNACTTTTAAGGGG
CCNAAGCACCANGGGAAAGCCTTTTGTTGCAGTTTTTGCTTCACAAGGGAGAATANCCTTANNAA
NGCCTTTAAAGNAAACCCCAANGGGAAAAGAAANTATGGGGCCCCAAGGTTACCCTTTGTCCGCT
TCTTANAAACCTAGGNGGGATTCCCCCC

| | |
|---|---|
| Sequence 558 | cMhvSH038a05 |

AGGNACCTCTCGGAGGGGCCCTCCTCCTGCTCCATGGGGATCCGCAGCGCCAGCCGGCCAGGGTTT
GAATTAGTCATTGTTNGGAGGATACAAATAGATGAAGATGGGAAGGTTTTTCCAAAGCTGGATCTT
CTCACCAAAGTCCCACAGCGAGCCCTGGAGCTGGACAAGAACAGAGCCATAGAAACTGCTCCTCT
CAGCTTCCGAACCCTGGTAGGACTGCTTGGAAATCTGAANCTGCTCTGGAAAGCCCTNNATAAAAT
CCGCTTTGTTGCAAGAGGGAGGAACAACTAGTTCCAAAAACAGTTGGAACGTTGGTAGGCATGAA
AGCATGCTTGCCGNTGGGAGGGAACATGTCAAATNTTTATTCAATTATTAAAACATTTTGCTATTTT
TCTGCTTAGNAAACCACACNCCTTGGAAGACCGTGCCTGTCTATGGCAGATTTATGGGCACCATTA
TTATGGGAAACTCTTCATGACATGGAAAAAATTAAATACCAACTAGTTTAAGTTATAAAAATGCCA
NNNTGNCTTTACTNATACCACCTGGNGCTNAAATTATGGATCCCTTTTACCAACNTCCCCCGCCCC
TTTAAANNTTTTTTTAAAAANAACAAANGGTTCCCCNNTGNCCGGGGNCNTGGGGCCNTTTTTTNA
AAAAA

| | |
|---|---|
| Sequence 559 | cMhvSH039f09 |

CCGCGGTGGCGGCCGCCCGGGCAGGTACCTGTTTTGTTTCCTGATTATTCCAGGATTCTCTCACTAG
ACCCTAAGCCTCTCATTCTGCTGTAGGTCAGATTCTCTATTCCTTCTCCCTAGCCCAGAGCCTTGCC
AGCACTTGCGAAAGTTACGGTTAGAATGTTCCCTTGCCTAGTCACCTCTTTGAAAAAAACACTGTG
ATGTTACATGACTGCGATTCAAATCAGACACTGTCTGCTTCCCACATGTATCTCAGACAGGTTTTAT
TTAATGTTTCTTGTCAGAATATTGTAAATTCAAAAGGATGACTTTAAATAAATGTAAACAAAGACA
AACTTGTGGTCTTTTTGTCTGGAATTACTTTCACAAGAGATGGAGCTTGCAGGGGAATTTACTGNC
TGACCAGTTACTAATGGTGAGCCCTTGC

| | |
|---|---|
| Sequence 560 | cMhvSH043g09 |

ACGCGGATCTTTCCCAACTTTAAATACTCTTTTAGTTTCTATAGGGAAGGAAGAGTTATTACAGGTT
TTTTTTTTAATTATTCTTTAACTTTAGATACTGCCAATCTGATTTAAAATTCTCCAAGCTTAATTCTG
TGCAACAAACAGAACCACACAAGCAGCCAGGCACTGTGGCTCACTCCTATAATCCCAGCATTTTTG
AGGCTAGATGGGAAGATCACTTGATCTCAGGATTTTGAGAACCATCCGGACAACATAGGGAGACC
TCATCGCTATTTTAAATAATTTTAAAAAGAAAAGAAAAAAAAAGGCCAAAGTGCTGGGATTATAG
GCGTGAGCTACCGCGCTCGGCCATTATATCTAGATTTTGAAACCTCATGTTTGTTTACCAAGTAGTA
ACAGGTGTACCAGCAGCTTCCAGGAATA

| | |
|---|---|
| Sequence 561 | cMhvSH044e05 |

CCGGGCNNGTACGCGGGAAGTGCGGGGCAGGACAAAGGGCTCTTTGCACAGCAGGGAGGCAATG
TTGGTGGGGGAGGGGCAGGAGGTAGGAAAGGCAAGAGGAGGAGGTTCTTTTCCCTGGGAGATTAT
TCANNTTTGGCATACANTTAAAGAAATCATTTTTAGTTCCCACTCAAGCATTGAATTTTTGCCAACC
ACATACTATTAACCCCAAATTTGATACATTTCAGAATATCTTGTAGGGATCCATTCTCGCCNTAAA
AAAAATAATAANAAAAAAAGGTCCCTCGGCTCGNTCTAGAACTAGTGGATCCCCCCCGGGNTGTA
GGAAATTNNTATATCTAAGCTTNTTCGNATAACCCGCTCGNACCTTTNAGGGGGGGGCCCCGGGTT
CCCCAAANTTTTTTGGTT

| | |
|---|---|
| Sequence 562 | cMhvSH045b02 |

CCGGGCAGGTACTTTTTTTTTTTTTTTTTTTTTTTTTTTTTTTACGTTAAAAAAAGTTTTATTTAGGGA
GCTCCAGGGAATGCGGNGGGAAAGGANAGGTGCAGTGTCATTGCCGCCCTCTCCTCCCACCTAGN
GCATTAATAGNGGATGGGAGCATNTGACAGAAGTGAGATCAGGCAGNGGGTGTNTGCNCCCCACA
GCGCATGTTGGCTGGAACAGCAAAGNCTATCTGCTGAGGTTTAGGCAAGTTCAGGNTGCCCATGA
TTTTGACAAACTCCTCACANCTGAGGGTGAGCCNAGGGTTCAAAGTCCTTTTCTTCTCCACGGGGG
ACACTGTGAACCCATGGTAATCGNGAGCNGGGTANATCANACNGCCTCCTGGAAGNGTGAANATC
TTTTNATGGCCCCNAGTGGTGCAAGGTCTTNGCACAACCTTGCTTGGAAGAACTTCCGCCCACCCC
CACNGATCAAACAGGGGCATCTTCCAATNAAAGCCCATTCTTNTGGGNCATTTTCANGGANNAAA
AGGGGACACCAANCCTTGGGGNTGGTGGCCCAANGGGGGTNGGCNCCTTGGTTCNTNCCAACNNC
GGAAAAACGCCCCCNAAANCGGGATTGGGAGNTCTCCCNTCCCCCAAATGGGNTAAAAGTTCAAC
CCTGGGGGCCCCCCCTAAAAGGCCGGGAANAAACCCCCCCNTCCCCTTGGGCCGNTTTTTGAANA
AAANTNGGGTNNCCCCCCGGNCTTNTAANNAAANTTNNANTTTTCACNCTTTTNAANNNCCCCCN
NCCCCNNANNGGGGGGNNCCCCNNNCCCCCCCCCTCTTTTTTTNCCCTTTTGGGGGGGG

| | |
|---|---|
| Sequence 563 | cMhvSH047h11 |

CGANCGGGCAGGTACTTTTTTTTTTGTTGNTTTTTTTTTTTTGGCTTATCACACCTGATTTTCTACAG
TNAGCATAAGTTGCACATGGATAATAACACACNTTNTTAAAAGGCNNAAACAACAACTATGATCA
CAATTTAAAGGCAGAAAAGTGCTATTATCTTAACAGAACATGGAACATCCATGTTCTATGATAATA
ATAAAGTTAGGCAAAGTTAATATCAAATAACCTGATATTCAATAGCCTAGTTTTTAATTAGTTTTA
GTAACACATATGGAAGAATCTGTTATGAATAAAAAACCATGTNGGCCGGGCACGGTGGCTCACGC
CTGTAATCCCAGCACTTTGAAAGGCCAAGGCAGGCAGACCACGAGGTCAGGAGTTCGAGACCAGC
CTGGCCAACATAAGTGAAACCCCGTNTTNTACTAAAAATACAAAAATTAGCCCGGCATGGNGGCT
TGTGCCTGTGATGCCAGCTACTTGGGGGGCTGANGGAGGAAAATCACTTGAACTTTGGAGGCGGA
AGGTTGCAATGAGACNAGAATNGGGGCCCTGCCCTTCCAAACCNTGGGNGACAGGAACCAAGGA
CTTNCATTTTCCGGGGGAAAAAAAAAAA

| | |
|---|---|
| Sequence 564 | cMhvSH056g11 |

AGGTACTTTTTTTTTTTTTTTTTTTTTTTTTCCCTATTTCTCANGNTTTNATTTTCANACTTTGCTAAT
TACTTTCTTNTAAANGNCTTCATTTTCAATGAANNTTTTNTAGCCATTNTCANTNTTTNTGTTTTAN
CANACCCNTTTANATTNTTCNCATTTAGCATAGCAAATGTTATATTTAATTTTATTTCTTGACCCNC
NTAAGGTTCNTAATNAACCGNATGGGNTTTTGGTTACCCCNTTTTTANAANNGTATTANCCNATTT
GNNANANTTNTTACCCANCCCCCNNTTGNTAATNTGGAGACTTANGACNNTCCAAAAAAAGGTAT
ACCCTCATTNTGAGGGCNCNNCAAAAACCCANNTTTTTNCNTTTATTTGNAAANNAAAAAGGTAA
CCANTTTTCCCCAATTCAAGGAAAGACTTGGGGGGNNAANATTTTCCCGGCCC

| | |
|---|---|
| Sequence 565 | cMhvSH057d12 |

AGGTACTTTTTTTTTTTTTTTTTTTTTTTTTTTATGAGATGGAATCTTGCTCTGTCACCCAGGCTGGA
GCATAGTGGCATGATCTCAGCTCACTGCAACCTCCACCTTCCGGGTTCAAGCNACTNTTGCGCCTN
AGCCACCCAAGTAACTGGGACTACAGGCATGCACCTCCACGCCCTGCTAATTTTTATATTTTTAGT
AGGGATGGCTTTCACCATGCTGGCCTTAANTGATCCGTCCGCCTTGGCCTCCAAAGTGCTGGGATT
TCAGGCAAGCGTTACCACACCCGACCCCTCACTAGTATTTCAGCATTAATGTTCCCTCTTTAACCAG
NGCTTATTATGAGTATACACAAACAACATTGCCTGACATAANAACAAGTTGAACCCACAGTGGAA
TCCCTACAGNGGCAGACAGTGGCAGCTGANAGTGACAGACCAACGGGGGGAAAAGCCACAAGCC
ATCTCCTGTAAGCTTCACTGCCATNACCTGAGCTCATGGCACACACCTGCTTTACCTNTAAGCGAG
GNGCTGCTCTTTACATTACCACTCTGGGAANAANCAGGCCCAACCAAACCCCACCANGNCGNTTT
AGCTTTTCAAGGGACCCCAAGACACATGTGTATAAAAAGCCANTTGCATGTGGTGNGNGGGGGGN
ATGAAATATANTGCCAAATATTTACCATGGNGGGANAGGNGGGGGGGAAANTNAGGNANTNTAA
AAAAAGCTTTTGGNGGGAAAAAGAAAAA

| | |
|---|---|
| Sequence 566 | cMhvSH058f01 |

CCGGGCAGGTACTTTATATGACTTGAATATGTTAAAACATATCAAAACTTGTTTCATGGCCCAGAA
TATGGTCTGTATTGGTAATATGTTTCATGTGCACTTGAGAAGAATAAATTTTGCTGTTGTTGAGTAG
TCTTCTATAAATGTCAACCAAGTTAAGTTGGTTGATAGTGTTTTTCATGTCTACTATATCCAGGCTG
ACTTTATGCCTACTTGTTCTATCAGTTATTAAGAGAGGACTATCGAAGTCCCCAATGATAATTGTG
GATTTGTCTGTTATTTTTTGTAAGTTGTATCAGTTTTTATTTAATTGATTTTGGAACCTTTTNNNNCT
AGGGNCATAGAACNTTTAAGGATGGCCANNGTCCCCTAANTTACNTGAACCCCCTTTTCATTNTTG
AAATGAACTTCCNTGGGATCTTTGGTCTGNAAAGCCNTTTTGGGCCAANNTAAAANAAGACGCCC
GCAGCANCTTTTTGGGGGNNCTAGGNTNAAACTANGGTATATCNTTTTTNCNATCCCCTTTAACCT
TTTTAAGGAATTTTGG

| | |
|---|---|
| Sequence 567 | cMhvSH062a08 |

AGCTCCACCGTGGTGGCGGCCGCCACTCTGGTTTTGCATCNTCAGGANACNGCTCGGGGCCNGNG
NGCTTCTCCTANNNNAATNNTTTTNTATAAGTGGCTCACGCCTTCCATAGCCACATCATCTCGGTTC
GAAATAGAACCCCATANAGAGGTAGGTTGTAGGAGGCCTGCAGGTACCTA

| | |
|---|---|
| Sequence 568 | cMhvSH062a08 |

NANGGAATTTCNATATCAANGCTTATCGATTACNCGNCGTACCTTAGAGGNGGGNGGCCCNGG

| | |
|---|---|
| Sequence 569 | cMhvSH062c12 |

AGCTCCACCGCGGTGGCGGNCGAGGTACGCGGTNGCCTGCGCCCTCTCCTATAAAGCNGACGCCG
AGCCGCGCTGCGACGCTGTAGTGGCTTCGTCTNCGGTTTTTCNNTTCCTTCGCTAACGCCTCCNGGC
TNNCGNCAGNCTCCCGC

| | |
|---|---|
| Sequence 570 | cMhvSH062c12 |

ATGCACGAATTCTGATATCAAGCTTTATCGATNCCANTTTACCTTNCAGGGGGGG

| | |
|---|---|
| Sequence 571 | cMhvSH063h03 |

AGGTACTGTTTAATCTTCTCCATGGGGCTAACAGAGTGAGTGTTAAGAGCAGTGTGGCCATCCTCC
AGCTCACTTGGCCGAACACTCAGCTCCGGGATGGTTCGAACGAATCTGGGGTGACTTATTGGGAG
ATACTTGAATGTCTTCATGTCTCGCCCGCCAATCACTCGGGCAGTGACCGTCTTCCCAACCTTCAGC
TTGGTAGTAGGAGAGGTGCCCTCTGGAACATCATTNTANAATGTGGGAGGCATGGATACAGCCAA
ATAANTGCCCATCTTCCAGAGTTCACAACCACATGGGGGTAGGCCTTTAAATTGGACCTTGGACCA
GTTCNCCTTGTNGAACCAANTGTCCCCCGAATGGGANGAGGGGTGNTGCTTNTTTATGGGTCCCCT
TACNAGNTCAAGANGCTTGGGAATCCACTTTTNTTTCNATCCCTTCATTCAAACCTGGTTCTTCANN
AAGNTTCCTTTCNTGGGGTTCCGGGCCCTTCAATGGGGACCCTTCTTTGGGCAANTNCCGGGNGCC
CCCCTTTCCACCAAGNCCCCAAAAAAGG

| | |
|---|---|
| Sequence 572 | cMhvSH064b08 |

TCCACCGCGGTGGCGGCCGCCCGGGCAGGTACTTTTTTTTTTTTTTTTTTTTTTTTTTGTTTTTTTTTT
TTTTTTTTTTTTTTTTTTTTTTTTTTTTTTTTTTTTTTTTTTTTTTTNATGGNNNCCACTTTNTTGCCNAA
NCNTGGAACTTGGGGNAANCCTNNACCTTCAANAACNNGCAAAAAAAANGNTGGGGGGNTTTTG
GGANNNNNCCNNNCCCAANGGGGAAACTGNCCGGGGAAATTCCNAAACNGGGAACAGGGGGGG
GTCCCCNTGACCCCCNAAAANNTTTTTCCCCCCNCCCTTNGGGGNGNGGNAGGGNACNNAAAAAA
AAAATGGCNTNCCAGGGGTTTTTCCCATNNTNCCTAANCCCNCNATNGGGGCCCCATTTNNAAANT
NCCCNGGGGNNGGGAAANGTTTTNGGAAAACGGCTNCCCAANAAANTNTCCNNNCCACCCNGGG
GTTTTTTNTTAAANCTTNNTCCCNAACCNNTTTGCCTTTTTTTACCCNTTNANAAAAANNGGCCNCC
ACANGNGGGGGNCCAAAAAAAAAATAACANAATTNCNGGGNNAAAANTTNTTNTNGGGGGGGNA
NATNTTTTTTNNTTTNGNCANTTNGGNAGAAAANGGGAAAAAAGGGGNGCTTTNCCCCCANCTTTT
NGNAAACCNCCTTTTTAAAGGGGGAAACNGNNCCCCCCTTTTTTTTTTTTTTTTTTTTTCCCNTTTAA
AAANACCANNCCCCCTTTTTTTTTTTNCCNATTTTTGCNCCCCAAATTTTTNCCCGGTTCCTTTGGN
NNNTTTATNNAAAAAAAAANNGGNNCCCCCCCNGNNNNCGNGGGANTTTTGNNTTTATCANNTTT
TTTNTTCNCCCCCCCCCCCCCG

| | |
|---|---|
| Sequence 573 | cMhvSH070a02 |

CCGCGGTGGCGGCCGAGGTACTTTTTTTTTTTTTTTTTTTTTTTTTAAGGAAAAGGAGACTGGAAGA
AGAAAAATAAGTATTTNTGGCAGAACTTCCGAAAGAACCAGAAAGGAATAATGAGACAGACTTCA
AAAGGAGAAGACGTTGGTTATNTTGCCAGTGAAATAACGATGAGCGATGAGGAGCGGATTCAGCT
AATGATGATGGTCAAAGAAAAGATGATCACAATTGAGGAAGCACTTGCTAGGCTCAAGGAATACG
AGGCCCANCACCGGCAGTCGGCTGCCCTGGACCCTGCTGACTGGCCAGATGGTTCTTACCCAACNT
TTGATGGCTCATCAAACTGCAATGNGAGNTTATCATGTCTTTGACATCTTGATCACCTACNCCGAT
AAGGGACAGTCTTCACCATTTTAGTCTTTGNATTTCTTTTCGAAACTTNCGACTCGCACCTGGGTNT
GCAAAAGAGGGNGTCTTGTTCATATANAATNGNNTATTTTCTCTACCCTGACAGAGACTNAATTTT
ACAGTCAAAAATANGGGTNATCATNCNNGGGGGTTTTGGTTTTTTT

| | |
|---|---|
| Sequence 574 | cMhvSH071f03 |

ACCGCNGTGGCGGCCGAGGTACAATCTACTTANTCAAGCATAATAGCACTAGGCNGAATAAAAAA
TTGCACAGACCGTATGCAGATTTTNCAAGATAGCATTCTTTAAATTCAGTATTCACCTTCCAAAGA
TNGGTTGCCCATAATANACTTAAACATATAATGATGGCTAAAAAAAATAANTATNCTGANAATGT
AAAAAAGGAAATGTAAGTCCACTCTCAATCTCATAAAANGTGAGAGTAAGGATGCTTAAAANCAA
AATAAATGNGAGGTTCTTTTTTTTTTCTATTTTCCCGNNTTATTCAATGNCAANTCTTGCCTNCTTTT
GATAATGNCCTTTAANGGGGTTTACCCCCATTTTTAAANTTTAAGGAAGGGTTTGGTAAATGGCCT
AATTGGGGTTGGGGGAAATTTGGAAAAAAATTTNGAATCCNAAANTTATTAACCACCCCTTTGGTC
CATTTTTNCATTTTTTCAAAAAATTTNGCCNGGCTTGGGNAAAAACCTTTCCCAAAA

| | |
|---|---|
| Sequence 575 | cMhvSH071g11 |

CCGGNCAGGTACATTCCATTANTTTTCANTGTCACCTAAGGGTCAAGGTTTAGGGGCCTGACACAN
TAGTGTCACTCAGGCTGTNGCCCCAGNTGTAAATATCAACAAGGAACTNTTTTNTCCTACCCAGNG
GTTTTGTGTNTNCTGCAGTATTCATAATNTATAAAAGAATGNTTAACTGTGAAGTGAAATCATATC
TACAAGTCCCNTACAACANTTTACTTNACAAANACNATTATTNTNCCANCCCTNAACTCAAAAAAG
CCACNCAAATACTTANAGTNTNNTTNCCAAANTNNCNCACAAGCTGGTCCTTGANGNACAAAAAG
GTCTTTCCCAAAGANGCCTTGGGCTCAGGGAAAANGCCCC

| | |
|---|---|
| Sequence 576 | cMhvSH073g05 |

AGGTACAATCTAGTTAAACAAGCAGAATAGCACTAGGCAGAATAAAAAATTGCACAGACGTATGC
AATTTTCCAAGATAGCATTCTTTAAATTCAGTATTCAGCTTCCAAAGATTGGTTGCCCATAATAGAC
TTAAACATATAATGATGGCTAAAAAAAATAAGTATACGAAAATGTAAAAAAAGGAAATGTAAGTC
CACTCTCAATCTCATAAAAGGTGAGAGTAAGGATGCTANAAGNCAAAATAAAATGTAGGGNTCTT
TTTTTCTANTTTCAGTTATATCATGCCAGNCTGCTTCTNTNTGATATTGCACTTAGGGGTTACCCAT
TTTAAANTTTAGGAGTGTTGTAAATGNCAAATGGTTGGGGNAATGGAAAAGATTTNGATTCAAAA
TTAATACCACCCTTGGTCAATATTTCAATTTTCCAAAATTGGCNGNGNCTNGGGTAAAACCTTTTN
NCAAAAAAAAAAAGGGGGTTNNGGGCCNTTNGNAAGGAAAAAAAAAAAAAAAAAATTCNAAAN
ATTTCAGTAAANNCTTNTTTTTTAGGGGGGTNTTGGGTGTNTTCTNGAATTANTTGGGCCNGGAAC
TAAAGGAAATANCCAAAGTTCCCCNNCCCAANGGNAGGAATTGGGNAAGCCCAATTTNTNAAAA
AATTAAAGGGGGTTAAANTGGGGGCCTTGACCAAGGGNNAATTTAATTTGGCCCAAGCCATTGGG
GGGACCAAGAAAATTGGANCCAACCAAGGGGCTTTGAAAAAAGG

| | |
|---|---|
| Sequence 577 | cMhvSH075b05 |

TTTTTTTTTTTTTTTTTTTTTTTTTTTTTTTTTTTTTTTTTTTTTTTTTTTTTTTTTTTTTTTTTTTNAAAA
AANNNTTTTTTTTTNNNNTGGNNNNNAGGGNNAANNCCCCCNCANTNTTTTNANNAAANCAANNA
AANANCTTTCNGGGGGGANANNNNTTTTNNNNNNNNNANNNCCTNGGGGGGCAAAAAAAAAANN
NNGNNCCNTTTTTTTNGGGGGGNCCCTNGGAAANNCCNNCCANGGGGNNTTTNAAAAAAANNGCC
CNTTTTTTTTANCNNTNTCCCCCGCNAAANAAAAAAANTCCCCNANNGNNCCCNGGGGNCCNNAA
AAAAGGGGGGGG

| | |
|---|---|
| Sequence 578 | cMhvSH092d02 |

AGGTACACAAGTAACCTGCTTTGTCTGCCCTAAGCGGTGGGCCCTGTCCATGGCCTGCTGGTCCAC
AGTGGGGTTCCAGTCGCTATCATAGAAAATCACTGTGTCTGCAGCAGTGAGATTGATACCCAGTCC
TCCAGCTCGTGTGCTTAACAGGAACACAAAGATGTCATTCCTGTTCTGAAAATCAAGCAACCATGT
CTCGCCTCTCCGAGATCTTGGATGAGCCATCAAGCCTCATGTAAGTATGCTTCCTGTAAACCATGT
ATTCCTCCAGTAGGTCTATCATCCTGGTCATCTGGGAGTAGATAAAGGACCCTATGCCCTTGAGAC
TTGAGCCGAGTNAGCAGGACATCAAGGGGCATACAAGCTTTNCCTGTCAGTGATGANGCTTCTCCT
TGCCTGGAATCCTGATGAAAAGAACCAGCCCATTCTTGANGTCTNAATGCTNCACAGAACCTTCCA
AGCTGGGCTTTTGGGGAAANAAACTTGGGGAATCGGTCNTATTTTAAGCCCAGTTCTNGCAAGCCC
AAGTTTCAANGGGGGCCCCCATTTTNAACAAAAAAACTGGNTTTGGGCTTGGCCAANAACTCCCTT
CCTTTCC

| | |
|---|---|
| Sequence 579 | cMhvSH093c11 |

CCGGGCAGGTACCATAGTTTTTAAACAGGAAAAAATACTTTACTTTTGACTAAAAACTGGCCAGAA
TTTCTCATACTTCTCATTTTAGGGCTTTAGATCTCTGCATCCCGAAGCACAAATTTAAATATAAAAA
TTAGATTAACTGTTCGTATGTCTATCAGAATCAAAGTTTTTTTCCTTTTTAAAGATTTGTGGGTTAC
CCTAATATAAGCTAGAATTTTAGTTTTATAATTTTTTTCTTTTTTAAAATTGAGATGGGGTCTTGCTA
TGTTGTCCAGGCTGGTCTCAAACTCCTGGGCTCAAGTGATNTGCCTGCCTCGGCCTCCCAAAGTGC
TGGGATTATAGGCGTGAGCCACCGCGCCCGGCCAAACTAGAANNTTAATATTTTTCACCTCCTCCC
AATCAGGTAGAACATCAATAGACTGGAAGAAGATACTGNTNAAGATGTTTCTTTTAACAAAAAAT
TTCACACGCCAAAAATTTAAGATTTTTNCCATTATTGAAGACATTATTNTCAAAAATCTTTCCTATA
ACACTTTTTAGGGGAAGAAGGTGGAAAAAAATACCTTAAAAAGGTCGCATCTTAACCGGGGGGGC
TCACTTGACCGATATANNTTCTTTAGAATAGAAAGGTCATTCACCCCCAAANGGTCTTTATTAATTT
TAAATTNAAGGTTAAAAACCCACNGGAGGACCCTTTATTAAACACCATTTTCNCCAACCTCNNAAN
GGCTAATTTTTNTTNCTTTCCNATATTCCAAAACATTCAAACCAAATTTTGATGANTCATNCCCAAT
NGGGCTNGTAAAAANNATTGACCCCAAAAACTTTTTTT

| | |
|---|---|
| Sequence 580 | cMhvSH094f06 |

CCGGGCAGGTACCTNTTTTTTTTTTTTTTTTATTTCAAAATAAANNTTANAAAAANNGGCNACCTNA
NTGNGNTTTNTTTTTTTTTTNNAAAAAACCCTTTTTGATTTTTNACCCCNCNCTTNGNGCAATGNTG
NNAATANNNNTTNNNNGAANCTTTNCCNCCCANNTTAAAAAAANTNNNNTNCCNAAACCCCCNAA
ANNNNNGGNANTNNNNGGNTNNNANNCCCCCCCCNGNNAANTTTTTNAATTTNAAAAAAAANGG
GGNTTNNNCNNTTTNGCCNNGGNNNNTTNAAAANNCNNANCTTTTAAANNNCCCCCNTTNGCCCC
CNAAAAGGGNGGNANNAAANGGNNNANGNCCCCCCCCCCN

| | |
|---|---|
| Sequence 581 | cMhvSH095d01 |

AGGTACTTTTTTTTTTTTTTTTTTTTTTTTTTTNAANNNAAAAAAAAAAANTTTTTTTTTTNNGNAAA
AAANAAAATNNNNNGGNCCTTTNNNANNNCCCCCCNTTTNNNTTTNGGNNTTTNNNAAAAAAANA
ACNTTTTNNAAAAATTNGNNNNAAAAAAAACCNNNTTTTTTNNTTTTNNGGGNCNGGGGTTTTNCC
CCCCCCCCCCCCCTTTTTTTNNNANCCCCCCCCCCNNGGGGGGGAAANTTTTTTCCAAAANNNGGG
GNCCAAAAAAAAAAAAAAANTTTTCCCAAAAACCCAAAATTTTTAAAAANCCCCGNCCNTTTTTN
NAAANGNCCNNTNNTTTTTNNGGNAAAANGNCCCNTTGGGGNNTCCCGGGGANCCCNCCCNNTTT
TTNAGGGNCCCNCCCNTTTTTTTNCGNANACCCNCNCCCTNGGGGGGCCCCAAANACCCNTNGGG
GGGGGAAAAANCCCNAANNGGATAAAAAANCCTTNNGGTCNGGGGGNAAAAANNNAAAATCTNC
CANGGGGCTTNANNANAAANTTTNNCCNCTTTCCTTTTCCCCCAGGGGGAAAAAGGGGAAATTTTT
TTTAANNNAAANAGGGCCCCNCNGGGGTTTTTTTTANNGGTTTNAAAAAAAAAAAATTTTTTTAAA
AAAAAAANATTCCCCCTTTTTTTTTCCNNGGGGGGGCNCTTTAAAAAAAAANGNGAACCCCCCCC
GNCCNGGGGGAAANTNNNTTTTAAANNTTTTTNNTTANCCCCCCCCCCCCCNC

| | |
|---|---|
| Sequence 582 | cMhvSH095d07 |

ANGTACCCGGNGGCGGAAACCACCCNTTCAAACGTCTGCCCTATCAACTTTTAANGGTATTCCCCG
TCCTACCATGGTGACCGCGGGTNACAGNGNAATNNAGGTTNAATTTCNNAGANGGANCNNGATAA
NCTGNTACCACATNTANNGAAGGCNTNACGCNCGCNANNTAAAAATGTNANCTAAAANANGAAA
TANGTTTGTNGCNGANNTANCTNTTNAAAATAAGGTCNNCCCNGAGTAGGGGTAANACCTCCAAC
ATGACTGGTATCCNTATAAAANGGANNGGGGGGGACACAAAAACACTNTNACANGNNTAATGCC
NNATNCTGATNACCGCAGAAATTGGGGTATTGTTTCTATTACCCCAGGGAATCCCAATTTTGCCAG
TGACCCCCAAAANTTTAAGGAGAAGCCTGGAACAAATTCTTCTGCACAAGTCCTNAAAANGAACC
AGCTTTGCTTAACCCCTTNATTNTAAACTGCCNGNCTTNCAAAACTGANAATAAAATTCCTGTTAT
GTTAAGCTTGCCCTTTTGTGGGGGCTTTTNTTTGGGCCNNCCTTTNNCCAAATTTATTNNAAAACCC
CGGCCNTTGAAAAAAAGGNCCAAAATTTTTTTTCCTAAAAAAGCCTTGGGGCTGGNGGNNGCATT
TCTTGCANTNCCCNTTTCTTTTGGCCCTGGGCNCTTTAATTTAAGGCCTTTNNCCTTTTTGANTTTAT
TTCCCCTTGGCCCCCAAAATAAACTTCAACCCTTGCNCCCCTTAAAAATNAAATGNTGANTTNTTT
NAAANCCGTGGNTTTTTTTCCCCCATTTTTTTTTTT

| | |
|---|---|
| Sequence 583 | cMhvSH099d01 |

ATGGAGTCTTGCTCTGTTGCNCAGGCTGGAGTGCAGNGGCGCGATCTCAGCTCACTGCAAGCTCCG
CCTCCCAGGTTCACGCCTCCCAGGTTCACGCCTCCCGAGTNGCTGGGACTACAGGCGCCCGCCACC
ATACCTGGCTAATTTTTTGTATTTTCAGTAGGGACGGGTTTCCGCCACGTTGGCCAGGATAGTCTCA
ATCTCCTGAACTCGNGATCCGCCCTCCTNCGCCTCCCAAAGNGCTGGGATTACAGGCGTGAGCCAC
CGCACCGGGCCTCTTGTCACTATTTAACAAAGCATAANGGCTCCTCTCTGCCTACTCTACCAGATC
CATGCTCTTTAGCCTGCCAGGCCAGGCTGTCCCTACCTCACATCCCCTGATCAGCTACATTATAATC
TAAGGCCTATCTCCTNTTTAACCCTGAACGTACCTCGGCCCGTCTAGAACTAAGNGGGATCCC

| | |
|---|---|
| Sequence 584 | cMhvSH099e09 |

ATGAAGTTTGTTTTGNCGANAAATTAGGTTACTTGNGTATCAAAGCTTATTTTTAAATNGNGTTAG
GGNGTANCCAANCCCTTTATTCTANANATNCTTTAGCTGNATTACTAANACATAGCTAGTATCTCT
ACTTAANGCTCTGGGTNGTAAACAGGGNCTTTCCATNGTTCTACCTTTAGGATTTCAATAGTNTAA
AACCGGTTGGTTTTTGAT

| | |
|---|---|
| Sequence 585 | cMhvSH102g10 |

TCCCCGCGGTGGTNGCCGCCCGGGCTNGTACGCGTTCATCTGTAATCTCAGCCTCCCGAGTAGCTG
GGACTACAGGCGCCTGCCACCACACCCGGCTAATTTTTTGTATTTTTAGTAGAGATGGGTTTTACC
ATGGTCTCGATCTCCTGACCTCCTGATCTGCCCACCCTGGCCTCCCAAAGTGCTGGGATTACAGGC
GTGAGCCACTGCGACCGGCCCACTTTTTCTTTTTACTTTTAAAAATGTGGGNTAATAGAAATTTATG
AGATTATATTTATGGTTCATACTACGTTTCTTTTGGACAGTGCCAGAGTGAATCAGATAAGCTTGC
ATTTTAAAATCCTAAGGGTAAATGCAATAGAGATAGAACGCAAATAATTGGGGAGGGGGGTTGAC
TGAAATTAAAGATGTATTAATCCAAAAGAAGGCNCAAANTAAANANAANCNNNNNGGTACCTCG
GCCGCTCTANAACTA

| | |
|---|---|
| Sequence 586 | cMhvSH103c09 |

CCGGGCAGGTACTTCAATTGAATCCAGATTTTATTTGTATTTCATTTCTCAATATTTTCTCCTCTACA
AAAACAGAGTGAAGTTGTAAGAATACTAGACCCAAGTTTCAAAATCTCATGTTAAGTGAGATTTTG
CATGTCCTCCGTAAAATTTCTGGAGCACTTTATAAAAGTTTATTTTCGTGGAAATCAAAAAACCAG
GTCATGATATTCTTTTCTAAGTCCCTAAACCTGTCTAACAATGCAAAGGTTGTCTGTCCTTCTTACA
TGTAGACTCATTTGTCTAAGTGGGCCTTAACATGTATGATTTCCATCAAGGCTGCTTGGCAAAGGC
TTTCTGTTAGTGTGTAAGGGGAATATGATGACCAATATAACAACCTCAGTATTTCCTCTACCTCTCT
TCAACTCCTCAACGTGAACCCAATGTTTTTGTGGAACACAAAGCCTCTGAATGCCTGGGAAGTCAC
CAGTGTGATCCCAGCCACCACCCATTAATCTTCTTAACTAGCATGTNCCTCATCATTACCTCCCTTT
CCAAAGCCCTTTGCATGTGCCTGTTCCCTGGCCAGAAAAGCCCTCAACTAAATGGCCCAAGAAGCT
AATGGAGAATTCCCCCCCAAAAATGGGGAAAAATTGGAATATTAAATGGAGAAAAGTTTTAAAAA
GGNNGCCAAAGATCAANGCCCCGGTGCCAGTGGTGGCACCGCCTNGTAATCCCCANCCCCTTTTTA
NAAGGCCCCANGTTGGGGCCGGGNTTAACAANGGTCAGGGAGANTCCGAGAANCCATTNCTTGNG
CTTACAACGGTGAAAACCCTTGTCTNTTACTTAAAAATACCCAAAAAAAA

| | |
|---|---|
| Sequence 587 | cMhvSH106c06 |

AGGTACTTTTTTTTTTTTTTTTTTTGGCCTTATATCAGTTTTATTGGTGGGTTTGTAGCTCCCTGGGC
CGGGCCTGGCTGCTTAGGCCAGTCTCTTGCTCACGCGCTCATAGGTCACGCCTCCGATGGNGGAGA
CCTCCACCAGCTTGTCACCCACGATCTCTGAGGTCTGGTGATAGTTGGGGAAATTCACCACCAGCT
TCCCGCCCTCCATNTGCACAGTGGCCTTAGAACGTCTTGCCCCCTATTGGNCTGTATGTTTGCTTTC
CTTGCCAACAGTGNAACTTGTTTTGGTCATGGNGGTGGCCCCCGGGAGTAGTTGNTTGGGGACCAA
NNTGAAAGTCCTGCCCATCCTTGCTGCACCTTTCCGGTGNACCANTNCTTTGGAAAGTTTNGCCGG
GCCCTTTTTTCNNGAANTACCATCCGNNTTGGGAGGAATCCCCCAAAGGGGAAGNCTNTTCAATG
GAAACCTTCCAATTNCAATAAAATTTTCTTTTCNTCAACNTCTTTCCAATTNTNNNNAAAACTTTGG
CCCNGGGTGGGAAAAAAGCCCAATGGCCTGGNTTGGGGGANNGGCTTTTTCCCTTTTTAATGGTGG
NNCTTGGNTTTTCAATTTTNTTCTNTGCCAANGGTTCTTTCCTTTTTNTCCGGGCTTCNACNCCCATT
GGNGGCNNCCGNCNAAGACCAAAANAANAANNTTTTCCCCCNCGGCCGGTTANCCCTTGCCCCCN
GGGGCGGGGCNCNGCTTTTTAAAAAACTTAANGNTGGGAATTCCCCCCCCCGGGGGGCTTGCNAG
GGGAANTTNCCAATATTNNTAAGCCTTTAATTNCGGATACCCGGGCCAACCCTCTTNAANGGGGG

| | |
|---|---|
| Sequence 588 | cMhvSH106f04 |

GCTCCACCGCGGTGGCGGCCGAGGTACTTATTTTTTTTTTTTTTTTTTTTTTTTTTTNAATTGTTTTTT
TTTTTTTTTTTTTTNCCTGTTTGNCTGATTTTTNTTATTTAAAAAAATGGAAAAACAAANGTGCATTT
TTCATTCAATAAATGNNCCATCCTTATTTAGNTTTGTNNCCNAANGGGAAGTCCNTNNCTTTNGAA
NGGATNTGCAATTTATNAACCANCAGCAATNCNTTTTNACACCGNTTTCAANNAACCTGNNNCNA
NTTTTCCCTTGAACCTGGNGGGGGGGNAAAATTTCTGAAAACTGGGNGGNAGATCNCCCNTTTNA
AAAGCNCCTTTGGGGNCNTTNTACNTTGGGCCCTGAAATNGATTCNNCCCCNCTTTTTTANNNCCA
TTTCCCNTGGAAAACCGTTAAAGGGGNNNNNNCTTTANAAAAAANANNCNTGTCAAAAGNNTNNT
NTTTGNACTCTTNACCAAGGCCNATTANCCCCCAAGGTTTTCNCCNCTTGGGAAAAAATTCTTANN
AAAANCNTGNGGTTNTGGGNGGANCCATTTGGGGGANTTTTANCCATTCCCAGNCGGGNCGGGGN
TTCCCTTTGGNACCCCCNTCCCAATGGGGGCCNCCCGCTTNTTGGGNNAACTTTTGGCGGGCCCCC
GGGAACTTTTTANNAAGACCCCCCCCCNTTTACCCTTNCCCCGGGGCCGGGGCCCGTTTTTTTAAA
AAACTTAAANTNGGNANTCCCCCCCCGGNNCNTGGCGAGGAAAAATTTTTTAAAANTTAAAAGCT
TTTTTTTNNANANCCCCCCNCACNCNTATTAAGGGGGGGGG

| | |
|---|---|
| Sequence 589 | cMhvSH110d05 |

ACTGAAAACCTTGGGATACACCTAAAGCTGCAGTCACAAATTCACAATCCTGAATCTTTTCTTTAA
GAATAAGCAAAAACCAATGCATCTTCAACGTAAACAATGTTAAAGACGAACACAGGCCAGGCACG
GTGGCTCAGGCCTGTAGTCCCAGCACTTTGGGAGGCCAAGGCGGGTGGATCATGAGGTCAGGAGA
TCGAGACCATCCTGGCCAACACTGTGTAACCCCGTCTCTACTAAAAATACAAAAATTAGCCGGATG
TAGTTGGTGTTGCCCCTTGTANTCCCAGCTACTAGGGAAGCNTGAGGCAGGAAGAGTTCCCTTGAA
CCCCAGGAAGCCCGGGAGGGTT

| | |
|---|---|
| Sequence 590 | cMhvSH112g04 |

ACTTTTTTTTTTTTTTTTTTTTTTTTTTTTTCTTTTTTTTTTTTTTTTTTTTTTTTTTTTTTTTTTTTTTTTT
TTTTTTTTTTTTTTTTTTTTTTTTTTTTTTTAAAAAANGGNGNNTNAANAAAANCTNGGNAANANTC
CCAAGGGNAAANGGNAAAANGNNGGGNNANGNNGGNNNAAANGNAAAANNNCGCTTTNNTTTN
CCCCNNCCCNANNAAAAAAAACCNNGGGNAAAANNTNNTAGGTNAAAAAANCAGGNAANCNAN
CATTTNGGGGNCNCNNACGGNAANCCCCCNGGGNGCCCATTNAAAAAAAANGGNANCCCCNGGG
NGGGNGAAATNAANNACAAACTTTTAAANANCCCAANCNCNCGGGGGGGGGNCCCNAANCNAAN
TTTTANNCCCCTTNAANGNGGGTAAATNCCCCCNNGGANAAAAAAAANGGGCAAAAANTNTTCCC
NGGAAAAAAAANGTTNCCCCCAAAAATTCAAAAAAAAAAAAAAACCCNGANAAAAAAAANNTN
AAAAACCCNGGGGGNCCAAAGGGGGGGACCCCNCCNAAAAAAAANTTTGNNTCCAAANCACNCN
CCNNATTTTTCAAAAAAANCNNAAAANACCGTGGTNNNNGCCAAGNTNGAANAAAAAAAAAAAA
ANGGACCACNCCCCCCCGGGGGAAAAANGGGNNNTTNAANAAANNTGGGGGCCCTTATTCCACN
NTTTCTATNAAAAAAAANAAANATCGGGGNGAAAAAGGNAANAAGGGGNGNNGGGGACGGGNT
ATAAAAACNAAACAAAAANGGGGGNAAATNNNNTTTTCCNAANAAAACNAGGGGNAAAAACCCN
AAAAAAAAAAAAATTT

| | |
|---|---|
| Sequence 591 | cMhvSH116f04 |

AGGTACGCNNNANCTTCAGGCTCCGAANCGGTGTGTNGCNGATCNAAGCGCTGNNNGAANNNTN
GANAAACCTNANGAGTAAACNTGTTCCNATCTATGATAAGAACNTGGNCANATCCCCATGTGTGA
CACCGGTGACCAGTGATCATTGAGNAANGGGACANGGATNGGGAAGCTATNTNANTGCCCCNGA
AGAANCTGCTGCANTTCNTTCCTNCTGAANTGCTTATGAAGGGNNNTTACATTCNCCTGCATACAT
TCCCATCCCTCTACTNTCCNCATGAGGACCACACCTTCTCTCCCTGAGAGTTTGGCTTAAGCANCCA
GATNAAGTTTTTTATTTTCNTTTGAAGGGGNAAGGGCTCTTTTCCTGCTNTNTTCGNAAATTAAAAA
NAACCCATTTAGATGTTTANCCGGGNNTAANGAAANAAATGCCNTTGTNTGGGCGGGTTNATNCC
TTGTANTGAAAGGATTTCTNAATTNNTATTTTGGGNANAACAAAAACTTTTTTGNGGTTTNCCTTG
CCCCGGGCNNGGACCNTTTTTAANNNANCTTNTGGGGATNCCCCCNGGGGCTTGNNAGGAAAATT
TTNATTTATNGGAANCTTTTTTTTCGATNCCCGNCNAAANCTTTAANGGGGGGGG

| | |
|---|---|
| Sequence 592 | cMhvSH121g02 |

AGGTACTTTTTTTTTTTTTTTTTTTTTTTTTGAGACAGAGTCTNTNTNTGTTGCCCAGGCTGGAGGGT
AATGGTGCAGTCTCGGCCCACTGCAATCTCCGCCTCCTGGGTTCAAGCAATTCTCCTGCCTCAGCCT
CCCGAGTAGCTGGGATTACAGGAGCCGCTACCACGCCCAGCTAATTTTTGTATTTTTAGTANANAC
TGGGTTTTTCCATGTTGGTCAGGCTGGTCTTGAACTCCTGACCACAGGTGATCTACCCGCCTTGGCC
TCCCAAAGTGCTGGGATTACAGGCGTGAGCCACTGCACCGGGCCTTGGATTTTTGGCATTCTGGAA
TTTTGGCATGGNGGGGGTTCTGGCTGGAGGTGGAANCATCCGTNTTGGCCCCACTGGCCTTGGGGC
CAAAGCCCTGGTCCATCCCCAGGCCAAGTCCTACCAAATCAGCTGCTAAGCCTGAACAAGCACTTG
AAAGCAGGGGTTTGGTCTT

| | |
|---|---|
| Sequence 593 | cMhvSH121g03 |

AGGTACTTTTTTTTTTTTTTTTTTTTTTTTTTTTGGAGGGGGGAGCCTGAAGGTGACATNTTGTTGGT
TTGGAGATGATTTATTCNCTCGTATTGTAAAATCTAAAATGACACTCCTGGGAAGAGGAAGGAACT
ATAAGGACCCGTGTGACCCATTGCTGTCTGCCTGAAGCCCTGGCGCTCTGACCTGAGTGCACCGGG
GTTAGGTGTCTCANCCAAAATGCAGGACTGCACGACGTNTAACACATTGGGANAGATTGCTCTTG
AAACATGGGGGTGGGGTATTCACCTGCATTCCAAAAAGTTTGGGGGGATTCTGGGANACCCCAGT
TGGAGNTCCTTCNGNACTTTCACAAGGGCCTTGTCTTCCCCACACTTTCAAAATTTCCAAANTCGTT
CCTTTNACCCAAAAAGGTGGGGTNAGGGAGTCACCTGGACTATTCAATTTTCCCCAAAAAATTCTT
AAAAAAAAAGGGAGGGTTTACCCCCGGGG

| | |
|---|---|
| Sequence 594 | cMhvSH122e04 |

AGGTACGCGGGGACCGCAGCCCANCAACTCGCAAACGCAACCTGAAGCCTGGGCTGCGCAGTGTG
GGAGGGCTTCGCGATCTTGGGGGACCCATTCCGAACTTGCAGAGGACCGTAGCTCTCCTGGCCTGG
AGAGTGTGAACAGGATTGTGGACTCTTCCAAGATTCACAATGATATGGTGAATCCAAAGACTGGA
ACCAAAAAGATTTACTCAGTGCTTTAGTTTTAACAACAGTAAATTGTCTACCAACACCCATCATGG
CTAAAAGTGCGGAGGTCAAACTGGCAATATTTGGGAGAGCAGGCGTGGGCAAGTCAGCTCTTGTA
GTGAGATTTCTGACCAAACGGTTCATCTGGGAATATGATCCCACCCTCGAATCAACCTACCGACAC
CAAGCAACCATCGATTGATGAAGTTGTTTTCCATGGGAAGATACTANACACTTGCTGGTCAGGGAA
AGATACCATTCAGAAGGGANGGGGCACATGCGATGGGGGGGAANGCTTTTTGTGCCTGGTCTTAC
NACATTACTGACCGANGAAGTTTTTTGAGGAAANTGCTTCCCACTTAANAAAACATTCTTANANTG
ANGATCNAAAAAAGCCC

| | |
|---|---|
| Sequence 595 | cMhvSH124b09 |

ACTTTTTTTTTTTTTTTTTTTTTTTTTTTTTTTTTTTTTTTTTTTTTTTTTTTTTTTTTTTTTTTTTTTTTTT
TTTTTTTTTTTTGCCCGGGGNAANCANNNTTTTTTTTAAANCNANANTTNAAAACTTTTANTTTTNG
NANNAAAAANNNGGGNNTTTTTAAAAAANNGGGNAANCCNNNANAAAATTTTTTAANTNTNAAN
NNNTNNNTTTTTTAANTTTTTTCNNNANTNNTTCCCAAAATNNGNTTTTTTTTTTAAANNNAANTTT
AANCCNGNNNTTTTTCNNCNCNAAANTGGGGNAAAAAAGTTTNNGGGGGGGNAAAAANTTNGGN
NGNNNTAAATTNAAAAAGNGNTTNTTTTTTNAAAAAAAATTTTAANNCNTTAAAAAAAAAACNGG
GGGAAAAATGGGGTTTNGCTTNNTAAAAAAAAANGGCCNCNGTNNCCNACNNNGGAACCCCCCN
CCNCCTTTANNGGGGNNTTTTTTTTNNTNGNNCCCTTTCTTTTAAAAAAAAANAGNGNNGTTTTGG
ANNCCCCCCAANNGNNNNCCNCCCCNAACCTNGGGNCCTTTTTAAAANNTNGNGGGNTCCCCCCG
NGGNNNNNNAAATTTTTTTTTTNAAGNTTTTTTTTTTCCCCTTTACNTTTTTNGGGGGGGGCCCNGG
GCNCCCNAANTTTTTTTTTCCCTTTTTTGGG

| | |
|---|---|
| Sequence 596 | cMhvSH124f10 |

CCGGGCAGGTACCGGGATCGCCGAGACAAGGTGGCAGCAGGTGCTTCNGAAAGCACACGGTCAA
ATGAGAGGACCGTCATTCTGGGAAAGAAAACAGAAGTGAAAGCCACNAGGGAGCAAGAAAGAAA
CAGACCAGAAACCATNCGAACAAAGCCAGAANAGAAAATGTTCGATTCTAAAGAGAAGGCTTTCG
AGGTAGAGAAACCTAAGATGGGAAGAATTGACNAAGTTAGATNAAGGAAGCCGAGACNNNAANA
GAAAGCCCANCCAGATGAAGGGAGAAGGGCTAAGGGAAGAAAGGACTNCACCCNGAAAGGGAN
AAAGAACCGTTGCCNAAGAAGAANAAGAGGGTGCCCCGATTTAGTNTTAGAAAGGTANTCCCCCA
GGGACAAGAAAGAAGCCAAGGAAGGGTGTTCCCCCCNTAAAA

| | |
|---|---|
| Sequence 597 | cMhvSH126a03 |

TTTTTTTTTTTTTTTTTTTTTTTTTTTTTTTTTTTTTTTTTTTTTTTTTTTTTTTTTTTTTTTNGGGNCCNN
GGGGAAANTTTTNTTTTTNCCNNCNGNANCNANNNTTTTNCNAAANCCNGNACCCCNGNNTTNGN
NAAAANCCNGNAAANNTNNNTNTTTTGCAAAAAAAAAATNNCNNCANGNCNNNCCTTTNCNNTTT
GNAANTCCNTTNNGCCNNAANTTAANCNCCTTNCCCATNGGGGCANNCCTTTAANGAANNTGGNG
GTTCTNCTTNNNCCCCTGGGGNAAAAAAAAGGGGGNNNTTCNGGGGNAGGGGGGGAAAAANAC
AACNCNTGGGGGGGGGGNTTTNAAAAAGGCCCCCCCNNNCCANNNNANNNTNANNCCCCTNTNG
GGGGGAAANTNACANANNTNTTTCNTGGGGNGNCCCCAAAANNCCTGTGNCGNCNNNANGATTTT
GGAGGGGTNCTTTTTTTNTCNNGACCCCNTNAACATNNAGACNNGGNTTTGGGTGANCCCCCCGN
CCCTNTTTTANNTTNTTCTCNNCCCCCNGGGGGGGG

| | |
|---|---|
| Sequence 598 | cMhvSH127f12 |

AGGTACAAACCCAGTTTGTTTTCAAAAAATCACAGTAGCAATGCAACTCATCACTCTAGAAAAGC
AAGCTTAGGCTACCTGAAAGATTTTCCCTTGGAAGTTTAGCGTATGTTTGACTAACAAGAATTCCC
TACATCAGAGACTCTAGGTGCTATATAATCCAAAAACTTTTCAGCCTGTTGCTCATTCTGTCCCATG
CTGGCAATAATACCTTGTCAGCCCATTACCCTTATTTTGAATTGCTCCATCTCCTGGTGGGACTTGT
ATCTTGTCTGCCATATCAGAACACAAACCCCTGAAGAGGTTCTGATTTTGATTTTTTTTTTTTCTTCA
TGCCTACCCTTTTTTTGGAAGTTTCCAGCCGCAATTTNAAATGAAATGACAAGGTGTATATTTGATC
AATTTTCATTCCCACCATTGCATTCAAACCTCTAACTTAAATGGGTAACCCTAAGGCATATNAAAA
GAANCAGACTGCATGGATAAAAACGGGAAAATAGAAAAAAAAAGGAACCTTACCATTTAATTTTT
GGGTTTTAAGCAACCNTTTACTTNTCACNTTTTTATGGAANAATTNGAGAAGNTGGGACCTTTACC
ATTTTCCCTTTTTTTTAACATTTTNTCGGAATTNCTTTTATTTTTTTTTTTT

| | |
|---|---|
| Sequence 599 | cMhvSH130h08 |

CTCATATAGGCGAATGGACCTCCACGCGGTGGCGGCCGCCCGGGCAGGTACTTTTTTTTTTTTTTTT
TTTATTATANAAAACAAGTGAGGNCCNAATGATCACAAAAANAAGGAATAATTCTAAGTCTCAAA
ATTGGCAAGAAATAANGTCNGATGCTAAAGTCCAAANNTTACGATAATGCACTTGNGCCAGGACC
AATGCCNATANAGAACTTGAAAATTAAGATGAGACATTTTTNAAGAACAAGTGA

| | |
|---|---|
| Sequence 600 | cMhvSH005c02 |

AGGTACTTTTTTTTTTTTTTTTTTTTTTTTCGAGATGAAGTCGCTCTGTCACCCAGGCTGGATGGAGT
GCAGNGGTACAATCTCAGCTCGCTGCAACCTCCGCCTCCCAGGTTCAAGCGACTNTCCTGCCTNAG
CCTTNTGAGTAGCTGGGATTACAGACCCATGCCAACACGCCCTCCAATTTTTGCATTTTTTTTTGTA
NANACAGAGTTTCACCATGTTGGCCCAGCTGGTCTCGAACTCATGACCTTGTGATCCGCCTGCCTC
GGCCTCCCAAAATGCCGGGATTACAGGTGTCAGCCACCGNGCCTGGCCTTATTTTCATAGTAATAT
GTAAAATATCCATAATGNGATCAACTGNGTATTTATAATAAATTTTAATAATATCTCCGTAA

| | |
|---|---|
| Sequence 601 | cMhvSH014d04 |

GGCGAATTGGAGCTCCCCGCGGTGGCGGCCGAGGTACTTTTTTTTTTTTTTTTTTTTTTTTTGGGACG
GAATTTCATCCAGGCTGGAGTGCAATGGCGCAATTTTGGCTCACTGCAACGTCCGCCTCCCATGTT
CAAGCGATTCTCCTGCCTCAGCCTCTCGGGTAGCTGGGATTACAGGCATGAGCCACCATGCCCGGC
TAACCTTGTATTTTCAGTAAAGATGGGGTTTCTCCATGTTAAGAATTGAGAGAGCCACTGAAAGGN
GAGTCAGGAAGCNTCATGATCACAGCCGTGCCTTA

| | |
|---|---|
| Sequence 602 | cMhvSH051a12 |

TCTGTCTCCCAGGCTGTAGTGCAGTGGCATGATCACGACTCACTGCAATCTCTGCCTCCTGGATTCA
AGCAATTCTCCTGCCTCAGCCTCCTGAGTNGCTGGATTACAGGCACACACCACCACGCCTGGCTAA
TTTTTTGTATTTTTGGTAGANATGGGGTTTCAACATGTTGGCCAGGCTGGTCTCAAACTCCTGACTT
CAAGTGATCTGCCTGCCTCAGCCTCCCAAAATGCTAAGGTTGCAGGCGTGAGCCACCGNTCCCAGC
CTNAAAATAGTTTCTAATGATNGGATACATCCAGTTCTCCANATCCAGCATTCTGGTTACTTAACA
AAGAGATAATAGTTTCTTTTATTGCTTCT

| | |
|---|---|
| Sequence 603 | cMhvSH070e02 |

ACCTGTAATCCCAGCTACTGGGGAAGCTGAGGCAGGAGACTCGCTGGAACCCAGGAGGCGGAGGT
TGCAGTGAGCTGAGATCTCACCACTGCACTCCAGCCTGGGTGATGGAGCAAGACTCCATCTCCAAA
AGAAAAAAAAAAGAGAGGCCCCAGTTCAGGCTAGCTCTGTCTGTCTTGTGGGGCA

| | |
|---|---|
| Sequence 604 | cMhvSH091f06 |

TTGGAGCTCCACCCGCGGTGGCGGCCGAGGTACTTTTTTTCTTTTTTTT

| | |
|---|---|
| Sequence 605 | cMhvSH093c03 |

CCGGGCAGGTACTTTTTTTTTTTTTTTTTTTNNANTAAAGGGGNTTTTTTTTTTTTAAAANNANNNN
AAAAAANCCNTTTNCNTTNAAAANAAAAAAAAAA

| | |
|---|---|
| Sequence 606 | cMhvSH112e09 |

CCGCGGTGGCGGCCGCCCGGGCAGGTACTTTCTCTTTTTTTTTTTTTTTTTTTGAGAGATAGAGCC
TCACTNTGTCACCCAGGCTGGAGTGCAATGGCATGATCTTGGCTCACTGCAACCTNCGCCTCCCGG
GTTCAAGCCATTCTCCTGCCTCAGCCTCCCAAGTAGCTGGGATTACAGGCACACGCAACCACGCCC
AGCTAATTGTTTTTGTATTTTAGTAGANATGGGGTTTNACCATGTTGCCCAGGCTGGTCTTAAATTC
CTGAGCTCAGGCAATCCACCCGCCTCANCCTCCNAAAGTCCTAGGATTATAGGCGTGAGCCANCA
CACCCNGCAAGA

| | |
|---|---|
| Sequence 607 | cMhvSH091c09 |

ATTGGAGCTCCCCGCGGTGGCGGCCGAGGTACTTTTTTTTTTTTTTTTTTT

| | |
|---|---|
| Sequence 608 | cMhvSH104d01 |

CCGCGGTGGCGGCCGAGGTACTTTTTTTTTTTTTTTTTTTTTTTT

| | |
|---|---|
| Sequence 609 | cMhvSH041a04 |

CGGCCGGAGGCTGACGAGAGCCGGGAGGCGTTAGCAGAAGGAAGAGAAAAACCNAAGACTAAGC
CACTACAGCGNCNCACCGCGGCGCGGCAGTCTGNTTTATAGGAGAGGGCGCANGCCCNCGNGTAC
CTNGN

| | |
|---|---|
| Sequence 610 | cMhvSH041a04 |

CGCTTGGCGNTAATCATGGTCATNAGCTTGTTTCCTGTGTGGAAATTGNTATCCCGCTCACAATTTC
CACACAAACAATACCGANGCCCCGGGGAGCATAAAGTGTAAAANCCTGGGGGTG

| | |
|---|---|
| Sequence 611 | cMhvSH094h05 |

AATTGGAGCTCCCCGCGGTGGCGGCCGCCCGGGCAGGTACTTTTTTTTTTTTTTTTTTTTTTTTTNGG
GNNCCNTTNNTNNAAAAACCNNNGGNCNAAANGGNTTTTNANGGNTTTAAANNNAAAAANCCCN
TTTTTTTNCNTTTTTNNCCCCCNNNNTTNAAAAAAAAAAAANTTTTTAAAANNTTTTNGGNAAAAN
NNNNNNNNTTTTTAAAAAAANTTTTTTNNNNCNGGCCCCCCCNCGGGANTTTTTTTTTTTTTTTTTA
AANGGGNTTTTTTTTTAAAAAAAAANNTTTTNCCCNNTTTTNNTTNANGGGGGNTNANNCCCCCCC
CNNTNNNNGNAANCNTNNTTTCCCCCNAAAATTNGNCCCANAAAAANNCCGGGGCTTTNGGGGGT
TTNTNGGGGGGNAAAATTTTTTTTTNGNAANCCAAAANTTTTTTTTNANGGTNNAAAGGCCCANTT
TTTNGGGNAAAAAAAAACCCCCCCNTANAAAAAAAANAATTTTTTTAAAANAAAAAANGGCCCCT
TTTTAANTNTNAAAAAAAAAAAAANANGGGGAAAATTTNTTTNTTTTNGGGGGAAAANGGGGGG
GTTTTTCCCCCCAAATTTTNNAAAAAGGGNGNGGGAAAAACCCCCNGNTTAANNTNGGGNCNTTT
TTAAAAAAANAGGNGGANCNCCCCCGGGGCGGGGANAAATTTTNANTTAAANTTTTNTNNANCCC
CCCCCNNC

| | |
|---|---|
| Sequence 612 | cMhvSG038d04a1 |

CATCTTGGTCCTTTTCCACCATTTTCAGCCCCTCCAGGGCTGGGAGGACCCGGNANGANNANACTC
TTNGNNCCTCGGCTGAAGTGGCTGGGCATGACGCCGTTTCTCTGACGTCCCCCATAGATCTTGGTC
ATGGAGCCAACCCCAGCGCCACCCCGGAGGTACCT

| | |
|---|---|
| Sequence 613 | cMhvSG038d04a1 |

TAGTGAGNGGTTAAATTGCGCCGCTTNGGCGTNAATCATGGGTCCATAAGCCTGNTTTTCCTTGTT
GTGAAAAATTTGTTTATTCCCGCTCACAAATTCCACCACCAACAATACNGAAGCCCGGGGAGGCAT
AAAAAGTGTNAAAAGGCCTTGGGGGTGCCCTTAATGGAGTGGAGCTAAACTCACATTTAATTTGC
GTTGGCGGCTCACTTGCCCGGCTTTTCCCANGTTCGGGGAAACCTTGTCCGTGGCCAANCTTGCCA
NTTAAATGGAAATCGGCCCAACGCCGCGGGGGGAAGAAGGCNGGTTTTGCGTATTGGGGCGGCTC
TTCCCGC

| | |
|---|---|
| Sequence 614 | cMhvSG025b07a1 |

GGGCAGGTACTACNCAGGCCTTGGCATNCCTGGGGTTCACCTGGCTGACTGGGGTGTTTGAGGCG
GGCAGCAATGTCTTCCACGGTCTCATTGCCTTCTGAGATGATGCCCACACCTTTGGCAATAGCTTTA
GCTGTGATTGGATGGTCTCCTGTGACCATGATGACCTTAATTCCAGCACTTNGACATTTGCCCACG
GCATCAGGAACGGC

| | |
|---|---|
| Sequence 615 | cMhvSG025b07a1 |

CGTCGACCTCGAGGGGGGGGGCCCCGGTACCCAGCTTTTTGTTCCCCTTTAGTGGAGGGGTTTAAT
TGCGCCGCTTTGGGCCGTTAATCATTGNGTCATAGCATGTTTTCCTGTGGTGGAAAATTTGTNTATC
CCGGCCTTCACAAATTTTCCCACCACCAAACCATTACCGAAGNCCCGGGGGAAGGCCATTANAAA
GNTGGTANAAAGGCCCTTGGGGGG

| | |
|---|---|
| Sequence 616 | cMhvSG048d02a1 |

CCGGGCAGGTACCATTCGCACACAGAGATATCGCCTNCTTTAGCGGTCATTGCCTTCTGACAGCGG
TGGAAGTCCAGGTAGTTCTGCCAGCAGTTTCTAGTCTGGTTCTGGTTGGGGAAGCGGCTGTCAAAA
GGGGCGGTCTTGTAGTTCTTGATTTTGGTCTCCATGTCTTCCGCCATGGNGCTGAATCCTAAAGGCA
CCCCGGATTCAACCTGCAGCTCAATGTGGACCCTCAGCAAAGACACCACAGTCGGACAGGAAGCG
GAAACTACTACCAGCCCGGAAGCTGANAGAGGTGGGGACTACCGGGNAGTCTCCCCGCCGTACCT
CGGCCCGCTCTAGAAACTAGNGGGATCCCCCGGGCTTGCAGGAAATTCGATATCAAAGCTTATTCG
GATACCCGTCNGACCTCGAGG

| | |
|---|---|
| Sequence 617 | cMhvSG048d02a1 |

TAANTGAGGGGTTAAATTGCNCCNCTTGGGCCGTAANTCAATGGTCCATAGCTGTTTTCCTGGTGT
GGAAAAATTGTNTATTCCCGCTTAACAAATTTCCCACACCANCCATTACCGAAGCCCGGGGAGCCA
TTAAAANGTNGNTAAAAAGCCCCTGGGGGGTGGCCCTTAAATTGAAGGTNGGANGGCTTAAACTT
CACCATTTTAAATTTGCCGTTTGGCGCCTCNACTTGCCCCGNTTTTTTTCCNATTNNGGGGGGAAAA
CCCTTGTTGCGNTGNCCCAACCTTTGCCATTTTAAATTGAAAATTCGGGCCCCAANCCNCCC

| | |
|---|---|
| Sequence 618 | cMhvSG070a01a1 |

CCGGGCAGGTACCTCAGTCCACATCTCCTTCACGTTCTNCAGNGNNCATGTTGCAGCGCCTATCGA
AGGCCTTCACGCGGCCCAGGAGTTTCTTATTGTTGCGGCAGTTGATGAGCACTTGGGTATTGTTCTT
GACTGACTGTGTGAGCACAGAGAGTGGACCGGTGTTAAATTCCTCCTCCTCTCGCTTCTGCAAGCT
CCTCTGGGGTCATCTCACTNTTGGGCTTGTTGAGGAGGCTCATGATGGTCACTACGCTCTCCGTTCA
CTCCCGTTTCCTCCCCCGCGGTACCTCGGGCNCGCTCTAAGAACTTAGGTGGGATCCCCCGGGCCT
GCAAGGGAATTCCGATATTCAAGCTTATCGATACCCGTCGACCCTTCGAGGGGGGGGGGCCCCGG
GTACCCAAGCCTTTTGTTTCCCTTTTAAGTGGAGGGTTAAATTGCGCGCTTGGCNGNTAAATCATG
GGTCANTAGCCTGTTTCCCTGTGTTGAAATTTGGNTNATCCCGCTCACAATTTCCANCACAAACATT
ACGAAGCCCGGGGAGCATAAAAAGTGGTAAAAAGCCTGGGGGGGTGCCTTAATGGAGGTTGAAG
CTTAAACTTCACAATTAAAATTTN

| | |
|---|---|
| Sequence 619 | cMhvSG071h12a1 |

GGAGCTCCCCGCGGTGGCGGCCGCCCGGGCAGGTACGCGGGGACATTTTCTCGGCCCTGCCAGCC
CCCAGGAGGAAGGTGGGTCTGAATCTAGCACCATGACGGAACTAGAGACAGCCATGGGCATGATC
ATAGACGTCTTTTCCCGATATTCGGGCAGCGAGGGCAGCACGCAGACCCTGACCAAGGGGGAGCT
CAAGGTGCTGATGGAGAAGGAGCTACCAGGCTTCCTGCAGAGTGGAAAAGACAAGGATGCCGTG
GATAAATTGCTCAAGGACCTGGACGCCAATGGAGATGCCCAGGTGGACTTCAGTGAGTTCATCGT
GTTCGTGGCTGCAATCACGTCTGCCTGTCACAAGTACCT

| | |
|---|---|
| Sequence 620 | cMhvSG071h12a1 |

CCCTGGGNGGGGGGGGCCCNCNNCCAAGTTNNNGTTCCTTGGGGGGNAGGGTCNCCNCGCCCCTT
GGCCNNNAAAAAANGGNTTTTCCTTTTNNGTNAAAAAGNGAAAAANNNGNTAAAAAANTTCAAA
AAAAAAANAAAAAAANNNNGGGNNNNNAAAGANAAAAAAAAAACGGGGGGGCCCCNNANGGG
GNNNNNNNNAACCCCCCNNTTNTTTTTNTNNTNGTNTCTTCCNCCCTNTTTTTTNNGNNAAAAAAA
AAANANNGNCCCCCCCTNTTTTTTTTTTNNTNNTTNCCCCCCCCCCCNCGGGNNANNNNGGGGGNN
NNNNNTTTTTTTGGGGGGTTTTTTNNNTTTTTTTTNNAAAAAAAAAAAAAAANNNNNNNNNNNNN
NGGNGGGGGGGGGGG

| | |
|---|---|
| Sequence 621 | cMhvSG039e01a1 |

AGGTACGCGGGGGTGTCCGCACAGAGGTCTGCAAGGAGAGAGAGTGTCTTCATTCTTTCCGCCATC
TTGATTCTTTCTCACTGACCAAGACTCAGCCGTGGGAAATATGAGTGAGCTTGTAAGAGCAAGATC
CCAATCCTCAGAAAGAGGAAATGACCAAGAGTCTTCC

| | |
|---|---|
| Sequence 622 | cMhvSG078d09a1 |

AGGTACTCCCCAGCAAATATTCTTTGTTGGCTTGCTTGACTAGATGAGCTGCTATAGTAGTCAATCC
TGTTAGACTTGGACCATTGTTTGTCTGAAGAACTGGAATCTGTCGCTCGCCCTGAGCACTGTATTTA
TTCCCCTTACTCAGTCCCAGGGACTTCTCCAGTAGCGACAACTCT

| | |
|---|---|
| Sequence 623 | cMhvSG078d09a1 |

CGATACCGNCGGACCTNCGAGGGGGGGGCCCCGNGTACC

| | |
|---|---|
| Sequence 624 | cMhvSG078d09a1 |

AGGGGTTAATTGCCGCCGCTTGGCGTAAATCATGGGTCATTAGCCTNGTTTCCTGTGTGAAATTGG
TTATCCCGCTCACCAATTTCNCACACAACCATTACGAAGCCCGGGGAAGCCATAAANGTGTANAA
AGCCCTGGGGG

| | |
|---|---|
| Sequence 625 | cMhvSG027c01a1 |

GGGGCAGCTGGAGGTGCCTCAGAANGTGCATTCTGCTTCCTGCAGGGGCTTGAAACACCAAGGCA
CTCCAGGGATCCTGGAGTCAAAGCAGCAGCCCCGGTTGTTGCACTCCTTGGGGGTGACATGGGGG
TAGCCGCAGTCCACCCTGTCCTTGGCTGGCACGGCACACTGGTTTGCAGACAGGCCCACGT

| | |
|---|---|
| Sequence 626 | cMhvSG027c01a1 |

TACCCAAGCTTTTGTTCCCTTTTAGTTGAGNGGTTAAATTGGCGCCGCTTTGGGCGGTAATCATGGG
TCATAGNTTGTTTCCTGGTGTGAAATTGTTATCCCGCTCACAATTCCACACCAACATAACGAAGCC
CGGNGAGCATAAAAGTTGTAAAGCCTGGGGGTGCCTA

| | |
|---|---|
| Sequence 627 | cMhvSG055b12a1 |

ACTTGCCCCAAATGTGCAACATAAATACAGAAGCGATGAACAGAAGACTCATAACCAATACTGGA
ACAGGGCCAACTTTGAACCCAGGTGAATCTTCTGTGTAGAATCGCCACATCCCCCCGGTGCCTGCC
GAGGTTGTGCGGCCTGCACTCCTTGTCCCACAGCTGGCATTTTTCCTCTGCCGGACAGTGGATCCC
GCC

| | |
|---|---|
| Sequence 628 | cMhvSG055b12a1 |

TGTTCCCTTTAGTGAGGGGTTAATTGCCGCGCTTGGGCCGTTAATCATGGTCAATAAGCCTGTTTCC
TGTGGTGAAAATTGTTATCCGCTCACAAATTCCACAACAACATACGAAGCCCGGGGAGCATAAAA
AGTGTAAAAGCCTNGGGGTGCCCTAATGGAGTGGAGCCTAACTTCACATTAAATTGCGTTTGCGCT
TCACTGCCCGCTTTTCCAAGTTCGGGGAAACCTGTNCGTGCCAAGCTGCATTAATTGAAATCGGCC
CAACGCCNCGGGGGAGAAGGCGGTTTTGCGTATTTGGGGCGCCTCTTCCCGCTTCCTTCGCTTCAC
TTGGACTTCGCTGGCGCCTCGGTCCGTTCCGGCTTGCAGGCGAGCCGGTNATTAAAGCTTCACTTC
AAAAGGGCGGGGAAANTAACNGNTTTNTNCACAAGNAATCNAAGGGGGGATTAAACCGCCAGGG
AAAAAANAAANATTGTTNAANNCNAAAAAAGGCCCAGCNAAAAAGGGCCCATGGAAACCCGTNA

| | |
|---|---|
| Sequence 629 | cMhvSG045h05a1 |

AGGTACGTCCAAATGACGAAGTCACTGCAGTGCTTGCAGNNCAAACAGAATTGAAAGAATGCATG
GTGGTTAAAACTTACCTCATTAGCAGCATCCCTCTACAAGGTGCATTTAACTATAAGTATACTACC
TGCCTATGTGACGACAATCCAAAAACCTTCTACTGGGACTTTTACACCAACAGAACTGTGCAAATT
GCAGCCCGTCGTTGATGTTATTCGGGAATTAGGCATCTGCCCTGATGATGCTGCTGTAATCCCCAT
CAAAAACCAACCGGTTTTATACTTATTGGAAATCCTAAAGGTAGGAAATAATGGGAAGCCCCTGT
CTGTTTTGCCCACACCCCAGGGTGGATTTTCCTCTTAAAAGAAAACCTTGGGCTGGGAATTTCTGG
CTGTGGGTCTTATTAAAATAAAACCTTCTTTAACATGGCTTCCCCGGANGNAAANAAAANANCTTN
NNATANNCANAATTAAAAAGGTACCCTTNNGGGCCCGGCTTCTTANNAAACCTAGGNGGGGATCC
CCCCCGGGGCCTGGCAAGGGAAATTTCCGAATNNTTCAAAAGCCTTTATTCCGATNANCCGGTCGG
AACCCTCNNAAGGGGGGGGGGCCCCGGGTTANCCCCANCNTTTTTGG

| | |
|---|---|
| Sequence 630 | cMhvSG027b03a1 |

CCGGGCAGGTACCCTTTCCAAGGTGACCTTCAGGGGGATTAACCTTCCTAGCTCAAGCAATGAGCT
AAAAGGAGCCTTATGCATGATCTTCCCACATATCAAAATAACTAAAAGGCACTGAGTTTGGCATTT
TTCTGCCTGCTCTGCTAAGACCTTTTTTTTTTTTTTACTTTCATTATAACATATTATACATGACATTA
TACAAAAATGATTAAAATATATTAAAACAACATCAACAATCCAGGGATATTTTTTCTATTAAAAAC
TTTTTTAAAAAATAATTGNATCCTATTATAATTCAATTTTTACATCCTTTTTTCAAAGGCCTTTTGTT
TTTTCTAAAAGGGCTTTGGTTTNTCCTTTTTTATTATTTTTTTGTCCTTTTTTATTNTTTTTTGGAGGA
CAAGTCTTGGCCTTCTGTTCCGCCTTCAAGGGCTNGGGAGTGGCAAGTTGGGCCACCGAATCCTTC
AGGCTTCAACCTGGCGAAACCCTTCCCTTCCCTTTCCCAGGGTTTNCAAGGGNGGAATTTCNTTTN
GTTTCAATTCAAGACCCCTCNCCCGAANTTAGGCCTTGGGGGACCTTACCAAGGGCCATTGGTGGC
CCACCTTNTTGGCCCCCAGGGCCNNAAATTTTTTTTGGTGANCCCTCNGGGNCCCGCNTTCTTANG
AAAACCTTAANTGGGGAATCCCCCCCCCGGGGGCCTTGGCAGGGNAAANTTTCNGNTTTTTCCAG
ANGCCTTTTNTTTGGATTACCCCGGTNCGGANCCCTTCNGAANGGGGGGGGG

| | |
|---|---|
| Sequence 631 | cMhvSG025b08a1 |

AGGTACTGATGCAACAGTTGGGTAGCCAATCTGCAGACAGACACTGGCAACATTGCGGACACCCT
CCAGGAAGCGAGAATGCAGAGTTTCCTCTGTGATATCAAGCACTTCAGGGTTGTAGATGCTGCCAT
TGTCGAACACCTGCTGGATGACCAGCCCAAAGGAGAAGGGGGAGATGTTGAGCATGTTCAGCAAG
CGTGGCTTCGCTGGCTCCCACTTTGTCTCCAGTCTTGACCCGCGTACCTGCCCGGGCGGCCGCTCTA
GAACTAAGTGGATCCCCCCGGGCCTGCAAGGAAATTCGGATATCAAAGCTTATCGGATACCGTCC
GACCTCGAGGGGGGGGGCCCGGGTTACCCAAGCCTTTTTGTTCCCTTTTAGTGGAGGGGTTAATTG
CGNCGCTTTGGCGTTAATCAATGGGTCAATAGGCTGTTTTNCTGTGGTGGAAATTGGTTTATCCCG
CTTCACAAATTTCCCACCACCAAACATTACGAAGCCGGGGAGGCCATTAAAAAGTGNTAAAAAGC
CCTGGGGGTGCCCTTAATGGAAGTGGAGNCTAACTTCACCATTTAAATTTGGCGNTTGGCGCCTTN
AANTGGCCCCCGGCTTTTTTCCAAGTTCGGGGGAAAAACCTTGGTCCGGTGGCCCNAANCNTTGGC
ATTTAAATTGGAAATTCGGGCCCCAAAACGCCNCCCNGGGGGAAGAAGGGCCGGGT

| | |
|---|---|
| Sequence 632 | cMhvSG024g12a1 |

ATAGGGCGAATTGGACTNCACCGCGGTGGCGGCCGNCGGGCAGGTACGCGGGGGACTTAGTGCTC
ATGCTCGCTGCAGGGGTCGGAGGTCAGGGCGAGCGTCTNGCAGGCCGTAGGAGGAAGATGGCGGT
GGAGTCGCGCGTTACCCAGGAGGAAATTAAGAAGGAGCCAGAGAAACCGATCGACCGCGAGAAG
ACATGCCCACTGTTGCTACGGGTCTTCACCACCAATAA

| | |
|---|---|
| Sequence 633 | cMhvSG024g12a1 |

CGACCTNGAGGGGGGGGCCCCGGTACCCCAGNCTTTTGTTCCCTTTTAGTGGAGGGGTTAAATTNG
CGCGCCTTGGGCGGTAATCATGGGTCATAAGCTGTTTTCCCTGTTGTGGAAAAATTGTTATCCGCTC
ACCAATTTNCANCACAAACAATACGAAGCCGGGGGAGCCATTAAAAAGTTGTTAAAAGGCCCTTG
GGGGGT

| | |
|---|---|
| Sequence 634 | cMhvSG043g05a1 |

TCATCCCTCTACAAGGTGCATTTAACTATAANTATACTGCCTGCCTATGTGACAGACNATCCAAAA
ACCTTCTNCTGGGACTTTTACACCAACAGAACTGTGCAAATTGCAGCCGTCGTTGATGTTATTCGG
GAATTAGGCATCTGCCCTGATGATGCTTGCTGTAAATCCCCATCAAAANCAACCCGGTTTTTTATA
CTATTTGAAATCCCTAAAGGTTAGAAATAAATNGGAAAAGCCCTGNTCTGTTTGCCCACCACCCCA
GGTTGGATTTTTCCCTCCTNAAAAGNAAAACCTTGGGGCCTGGGGAAATTTTCCTNGCCTGGTAGG
GTCCTTATTAAAAAAAATAAAAAACCTTTTCTTTTAAACCATTGGCCAGANTATGNNCATAGTGAA
TTNNNCGANTNTNCNTAAATATTNNTNNTNTNGGNTTCCCNTTNGGGCCCCGGNTTCTTAANAAAC
NTATTTTGGGNAATCCCCCCCCGGGTCNTGGCNANGGNAANTTTCGGATATTCNAAAGCCTTTANT
CNAGATTACCCGGGNCCNNACCCCTCATAAGGGGGGGGGGGCCCCGNGG

| | |
|---|---|
| Sequence 635 | cMhvSG048f11a1 |

ATATAGGGCGAATTGGACTCCACCGCGGTGGCGGCCGCCCGGGCAGGTACGCGGGGGCAGTTCGG
CGGTCCCGCGGGTCTGTCTNTTGCTTCAACAGTGTTTGGACGGAACAGATCCGGGGACTCTCTTCC
AGCCTCCGACCGCCCTCCGATTTCCTCTCCGCTTGCAACCTCCGGGACCATCTTCTCGGCCATCTCC
TGCTTNTGGGACCTGCCAGCACCGTTTTTGTGGTTAGCTCCTTCTTGCCAACCAACCATGAGCTCCC
AGATTCGTCAGGAATTATTCCACCCGACGTGGAGGCAGCCCGTCAACAAGCCTGGTCAATTTGTAC
CTTCGGGCCGCTCTTAGNAACTAAGTGGATCCCCCGGGNCTGCAGGGAAATTCCGATNTCAAAGCT
TATCCGATACCCGTCCGACCTTNGAGGGGGGGGGCCCCGGTACCCAAGCTTTTTGGTTCCCTTTAG
TGAGGGTTAAATTGCGCCGCTTGGGCGGTAAATCATGGTCATAAGCTGTTTCCTGTGTGAAAAATT
GTTATCCCGCTTCACAATTTCCCACACAAACCATTACCGAGCCCGGGGGAAGCATTAAAAGTGTTA
AAAGCCCTGGGGGGTGGC

| | |
|---|---|
| Sequence 636 | cMhvSG045a12a1 |

AGGTACTTTTCCCCACACCAGCGGTGCCGACTACCACGACGCGGTAATCTCTGATCTTCCTGTGGG
GCTTGAAGGCGCGGAGGATAAGCAGGGCGGGCAGAAGCCGCAACCGCTTCAGCAGCTTCTGTTCC
TTGGAGCCAAAGCTGGCGTTACCCATCGTTGGGATTCGGAGGGGAGATACGTGCACAAGTTCTCCC
ACACTTAGCTGGCAGCAGGAGACCCCTTTCTCGGAGGCACGAACCAAGCAGCCTTAGAAGACAAA
TGCGCTGCTCGGAAGAGACTGCCGCGGCAACCAACTGGGACACCCCCCGCGTACCNTGCCCGGGG
CGGCCCGCTTCTAGAAACCTAGTGGGATCCCCCGGGGCTGCAAGGGAATTTCGATATCAAAGCTTT
ATCGATACCCGTCGACCTCCGAGGGGGGGGCCCGGTTACCCCAGCTTTTTGTTC

| | |
|---|---|
| Sequence 637 | cMhvSG011e09a1 |

AGGTACCTGCAGGCCTCCCACACCTACCTCTCTCTGGGCTTCTATTTCGACCGCGATGATGTGGCTC
TGGAAGGCGTGAGCCACTTCTTCCGCGAACTGGCCGAGGAGAAGCGCGAGGGCTACGAGCGTCTC
CTGAAGATGCAAAACCAG

| | |
|---|---|
| Sequence 638 | cMhvSG011e09a1 |

GTTAATTGCGCCGCNTGGCCGTAATCATGGGTCATAACTTGTTTCCTTGTGTGAAATTGGTATCCCG
CTCACCAATTTCCACACAAACATACCGAAGCCCGGGGGAGCCATTAAAAGTGTAAAAGCCTGGGG
GTGCCTAATGGAGTGAAGCCTAACTTCCACATTTAAATTTGCGTTTGCCGCTTCACTTGCCCNCNTT
TTCCAANTCCGGGNAAAAACCCTNGTNCGTGGCCCAAGCTTGNAATTTAAATNGAAATCCGGGCC
CAACCGCCC

| | |
|---|---|
| Sequence 639 | cMhvSG055f10a1 |

GGTGGCGGGAGGAACCGTTACGGGAACTGAAGTTGCGGATTAAGCCTGATCAAGATGACAACCTC
CCAAAAGCACCGAGACTTCGTGGCAGAGCCCATGGGGGAGAAGCCAGTGGGGAGCCTGGCTGGG
ATTGGTGAAGTCCTGGGCAAGAAGCTGGAGGAAAGGGGTTTTGACAAGGCCTATGTTGTCCTTGG
CCAGTTTCTGGTGCTAAAGAAAGATGAAGACCTNTTCCGGGNAATGGCTGAAAGACACTTGTGGC
CGCCAACGCCAAGCAGTTCCCGGGGACTGCTTCGGATGCCCTTTCGTAGAGTGGTGCCGACGCCTT
CTTGTGATGCTCTCTGGGGAAAGCTCTCAATCCCCCAAGCCCCTCATTCCAGGAGTTTGCAGCCCG
AGTAGGGGACTCCCTCCCCTTGTCCTCTTACCGNAAGGGAAAAAGGATTTGCTATTGNTCGTTACC
CTNNGGCCCGCTCNTAGAAACTAAGTNGGAATNCCCCCCGGGGCCTGCAAGGGAAATTTCNATTA
TTCAAAGCCTTTATTCGGATACCCGTCCGACCCTTCGAANGGGGGGGGGCCCGGGTACCCCCAANC
TTTTTTGGTTTCCCTTTTAAGTGGA

| | |
|---|---|
| Sequence 640 | cMhvSG078e11a1 |

AGGACGCGGGGAGGAAGTGTCGGCGCCGCCACTGTNCGGCCACAGCCTAACGCTCTTCGCTGTCG
TTTGTGGTCTCGCGCAGGGCGGCCCCGGTTCTGGTGTTTGGCGTCGGAATTAAACAACCACCATGT
CGAGCAAAAAGGCAAAGACCAAGACCACCAAGAAGCGCCCTCAGCGTGCAACATCCAATGTGTTT
GCCATGTTNGACCAGTCACAGATTCAGGAAGTTCAAAGAGGCCTTCAATATGATTGATCAGGAAC
AGAAGATGGCTTCATCGACAAGGGAAAGATTTGCATGGATATGCCTTGCTTTCTCTAGGGGGAAA
GAATCCCACTGGATGCATACCTTTGGATGCCATGATGAATGAAGGCCCCAGGGGCCCATCAATNTT
CACCATGGTTCCTGGACCATGTTTTGGGTNGAGGAAAGTTAAATGGGCCACCAAGATTCCTGGAA
GAATGGTCATTCANGAAAACCGCCCTTTTGCTTTGCTTTTNGATTGAAAAGAAAAGCCTAACCAGG
GGCACCCATTTCAAGGGAAGGATTTACCCTTANATTAAGAAGCCTNGCTTGGACCAACCCATTGGG
GGGGGGAATCCGGGNTTNTACCAAGAATTGNAGGGAAAANTGGGATTGGAGNCTGGTTACCCTTG
CCCCGGGGCCGGGNCCCGNNTCTTANNAACCTTAAGNGGGNATCCCCCCCGGGNCTTTGCAAGGG
AAATTCCGATTATTCAAAGGCCTNTATTCNGATTACCCGNCNGACCCTTCGAAGGGGGGGGG

| | |
|---|---|
| Sequence 641 | cMhvSG038c11a1 |

AGGTACTTTGGCCTCTCTGGGATAGAAGTTATTCAGCAGGCACACAACAGAGGCAGTTCCAGATTT
CAACTGCTCATCAGATGGCGGGAAGATGAAGACAGATGGTGCAGCCACAGTTCGTTTGATCTCCA
CCTTGGTCCCTCCGCCGAAAGTGAGCAGTGAGCTACCATACTGCT

| | |
|---|---|
| Sequence 642 | cMhvSG038c11a1 |

GTCTGGGNATGCCAGTGGCCCTGCTGGATGCACCATAAGATGAGGGAGCCCTGGGNAGCCTGGCC
CAGGGTTTCTGCTGGGTACCCTGCCCGGGCCGGCCCGCTCTAGA

| | |
|---|---|
| Sequence 643 | cMhvSG038c11a1 |

GAATTCGATATCAAAGCTTATCGATACCCGTTCGACCTCNAGGGGGGGGGGCCCCGGTACCCAAG
CTTTTTNGTTCCCTTTAAGTGAGGGGTTAATTGCGCCGCCTTGGCCGTAATCAATGGGTCATAGCTT
GTTTCCTGTGTNGAAATTGNTTATCCGCTCACAATTCCCACCACAACATACCGAGCCCGGGGAGCA
TAAAAGTGTAAAGCCCTGGGGGTGCCTAATGAAGTGGAGCTTAACTCACATTAATTTGCGNTGCN
GCTCACTTGCCCGCTTTTCCAGTCGGGGAAAACCTGTTCGTGCCCAGCCTGGCATTAATGAATCGG
GCCCAACCCCC

| | |
|---|---|
| Sequence 644 | cMhvSG028a02a1 |

NCCGGGCAGGTACTTTGGCCTCTCTGGGATAGAAGTTATTCAGCAGGCACACAACAGAGGCAGTT
CCAGATTTCAACTGCTCATCAGATGGCGGGAAGATGAAGACAGATGGTGCAGCCACAGTTCGTTT
GATTTCCACCTTGGTCCCTTGGCCGAACGTCCGTAGAGTTCTATAGTATTGTT

| | |
|---|---|
| Sequence 645 | cMhvSG028a02a1 |

TCGGTCAGGGACCCCGGGATGCCCGGGTAGAAGCCCAGTAAAATGAAGCAGTTTTAGGAGGCTGT
TCCTGGTTNTCTGCTGGGTACCTTCGGCCGCTCTAGAACTAAGTGGATCCCCCGGGGCTGGCAAGG
GAAATTCGATNTTCAAAGCCTTATCGGATACCCGTTNNANCCTTCGAGGGGGGG

| | |
|---|---|
| Sequence 646 | cMhvSG029c11a1 |

CCGGGCAGGTACCAGGCTAAGTAGTTGCTGCTATCACTCTGACTGGCCCTGCAGGAGAGGGTGGN
TCTTTCCCCTGGAGACAAAGACAGGGTGCCTGGAGACTGCGTCAACACAATTTCTCCGATGGTATC
TGGGAGCCAGAGTAGCAGGAGGAAGAGAAGCTGCGCTGGGGTTTCCATGGTTCCCTCTGGGTCCT
AACTGAGCAGCTCTTCTCTCCCGCGTACCTCGGCNCGCTCTANAACTAGT

| | |
|---|---|
| Sequence 647 | cMhvSG029c11a1 |

TAANTGCCGCGCTTTGGGCGTTAATCATGGNCATTAGCTGTTTTCCTGTGGTGAAAATTGGNTATTC
CGNTTCACAATTTCCACACAAACATTACCGAAGCCGGGGGAGCCATAAAAGGTTGTAAAAAGCCC
TGGGGGGTGGCCCTAAATGGAAGGTGGAAGCCTTAAACTTCNACCATTTAAATTGGCCGTTTGCGG
CCTCACNTGGCCCCCGCCTTTTTCCAAGNTTCCTGGGAAAAACCTTNTTCGGTGCCCCAGCCTTGCA
TTTTAAAATG

| | |
|---|---|
| Sequence 648 | cMhvSG038f08a1 |

AGGTACTTGTTGTTGCTTTGTTTGGAGGGTGTGGTGGTCTCCACTCCCGCCTTGACNGNAGCTGNTA
TCTGCCTTCCAGGCCACTGTCACGGCTCCCGGGTAGAAGTCACTTATGAGACACACCAGTGTGGCC
TTGTTGGCTTGAAGCTCCTCAGAGGAGGGCGGGAACAGAGTGACCGAGGGGGCAGCCTTGGGCTG
ACCTAGGACGGTCAGCTTGGTCCCTCCGCCGAACACTATGGCACTGAGGCTGTAAGTCCCATGTTG
AACAGTAATTAATCAGCCTCGTCCTCAGGGCTGGAGGCCCCGAAATAAGTCAGGGGAGGCTGTGG
GTCCCANACTTTTTGAGCCANGAGGAAGCGGGTCAGGGGATCCCTGAGGGGCAAGAGAATTTTCC
AAACATCACAGTTTTGGGGAGCCGCCCGTGAGGAAAATCNTGTTGGTACCNTGCCCCGGGCCGGC
CCGCTCTANGAACTAAGTGGGATCCCCCGGGCCTTGCAGGGAATTTCNGATATCAAGCTTTATCGG
ATTACCCGTTCGACCCTCNAAGGGGGGGGCCCCGGTTACCCCAAGCTTTTGGTTNCCCTTTTAAGT
GGAGGGGT

| | |
|---|---|
| Sequence 649 | cMhvSG025h08a1 |

AGGTACAACAAGCGGGAAACGATAGAGGCTTGGACTCAACAAGTCGCCACTGAGAATCCAGCCCT
CATCTCTCGCAGTGTTATCGGAACCACATTTGAGGGACGCGCTATTTACCTCCTGAAGGTTGGCAA
AGCTGGACAAAATAAGCCTGCCATTTTCATGGACTGTGGTTTCCATGCCAGAGAGTGGATTTCTCC
TGCATTCTGCCAGTGGTTTGTAAGAGAGGCTGTTCGTACCTGCCCG

| | |
|---|---|
| Sequence 650 | cMhvSG025h08a1 |

GATCCCCCGGGCTTGCAGGGAATTCGATTATCAAGCTTTATCGATACCGTCCGACCCTCGAGGGGG
GGCCCCGGTACCCAGCTTTTTGTTCCCTTTTAGTTGAGGGGTTAAATTGCCGCGCTTGGGCGTTAAT
CATGGGTCATAAGCTGTTTTCCCTGTGTGGAAAATTTGTTTATCCCGCTCACAAATTTCCCACCACA
ACAATAACGAGCCCGGGGAGCCATTAAAAAGTTGGTAAAAAGCCCTGGGGGGTGGCCCTTAAATG
AAGTGGAGGCCTAAACTTCCACAATTAAATTTGCCGTTTGGCCGCCTNCAACTTGGCCCCCGGCTT
TTTTCCCAAGTANCGGGGGAAAANCCCCTTGGTTCCGTTGGCCCAAGGCCTTGGCAATTTAAAATT
GGAAAA

| | |
|---|---|
| Sequence 651 | cMhvSG045d02a1 |

ACGCGGGAAATATATTATATATGGATGTGTGTGTGTGCGTGCGCGTGAGTGTGTGAGCGCTTCNGC
AGCCTCGGCCTAGGTCACGTTGGCCCTCAAAGCGAGCCGTTGAATTGGAAACTGCTTCTAGAAACT
CTGGCTCAGCCTGTCTCGGGCTGACCCTTTTCTGATCGTCTCGGCCCCTCTGATTGTTCCCGATGGT
CTCTCTCCCTCTGTCTTTTCTCCTCCGCCTGTGTCCATCTTGACCGTTTTTCACTTGTCTCCCTTTTCT
GGACCTGTCCCTGCCAATGGCTCCAGCTTGTCGTNCTGACTCTTGGGGTTNCGTTTGGGGGGACAT
GGAAGAATTTTTTATTTTTTTTGGTGGAAGTTGAAGACTGGAAGGGGATCGGTAGGAATTTTTTTT
ACAAAATTNTGTGAANTANTTTTGGAACAAAATTTCTTGGGGGTTGCCCGAAGNTGGTTGAAGAA
GGTTGGTTGNAAGCNAAGGGGGCCTTTTGGCNTTCCCTGGGCCCAAACCCAACCAAATTTTCCAAA
TTGGAAAATTNCCCCCGGAACCCCCCCCCCTTAACCCCCCAATTGGCCTTGGTAACCCCTTGGCCC
CCCGGGGGCCGGGGCCCCGCCTTCTTAGGNAAACCTAAGGTNGGGAATTCCCCCCCCCGGGGCCT
TGGCAAGNGGAAAATTTCCGAANTANTCCAAANGCNTTTAATTCGAATAACCCCGGTCCNGNAAC
CCTTCNGGAGGGGGGGGG

| | |
|---|---|
| Sequence 652 | cMhvSG002h01a1 |

CCGGGCAGGTACGCGGGGCCCTCTCTGTCTTCTCTGCAGTGGGAGCAGCTCTCCTGCCACGGCTCC
TCACCCCCTGAAAATGTTCGCCTGCTCCAAGTTTGTCTCCACTCCCTCCTTGGTCAAGAGCACCTCA
CAGCTGCTGAGCCGTCCGCTATCTGCAGTGGTGCTGAAACGACCGGAGATACTGACAGATGAGAG
CCTCAGCAGCTTGGCAGTCTCATGTCCCCTTACCTCACTTGTCTCTAGCCCGCAGCTTTCAAACCAG
CGCCATTTCAAGGGACATCGACACAGCAGCCAAGTTCATTGGAGCTGGGGCTTGNCACANTTGGG
GTGGCTGGNTCTTGGGCTGGGAATTGGNACTGGTGTTTTGGAANCCCAATCAATTGGGTATGCCCA
GGAACCTTTTNTTNANCAACAGCTTTTTTTCTAACGCCAATTTTGGGCTTTTGCCCTTTCGGAAGGG
CCATGGGGGCTNTTTTTGTNTTGAAGGGGANGCCCTTTTNTNATCCTTNTTTTGNCCATTGTNGNAA
AGGAAACCCGNTTTTCAACCCTTCCCAATAAAGTTNTTCCCCCGTTTTTGGGTTGGGNCCCCCCGG
GGGGGTNCCCTTTTTCCTTANAACCCTCCCCCAAAGCCAAACCCTTNGGGGGAAACCTGGGGTTGG
GCTTNAAGGGTTTTTGGCCCCNANAAAAAAAACCAAAANAAAANTACCTGTNTTTTAANTGGGGA
AAAAAAAAAAAAAAAAAA

| | |
|---|---|
| Sequence 653 | cMhvSG070b03a1 |

AGGTACAGAACTTTACAGAATAGAGGCAATACTTTAGCTTAAGNNNGTCTGCTGACCAGAGAATG
GANTTCTGCGTGGACTCAAGGAACAAAAGGAAACTAGGCAGGGAAGGGGAAGAAAAGTGCCCAT
CTGAATCAAACTTCAGCTGCCATCAGGGCACATCTTGTGGTGGTCACAGATTGTAGGCTGTTTTTT
GGAAGATTCGGGTTCAGCACAGGATTCCATTTGTCTACTTGGCTACACCCCTGGCTGAGGTGCCCA
TGAGGTCCAATGTCACTCAAAGTTCCTGGGCCCAGCTCAAAACTCCCCGCAAGCAAAAAGAGTCC
CCAAAATTTAGTATCAAAGTTCCTCNCGGGAAGGTCATTCCCTATCAGTTGGCAAAAGCGGGTAAG
ACCGCCCCGAAAAGCCCAATCTCCCCACCGTTGTCCCGGTATTTCGGGGNAGTTTCATTTAGCCCG
AAGCCCAGCCAGGCGCCTCACCGGGGACCAGTGCCTGGAAAGCCCATAAGTGGGAAAAGCCTTTT
CCGCCATTGGGGNCCTTCGGGTGGGGAGGGACCCCCCGGCGTTACCCTTGCCCCGGGNCCGGGGC
CGCTTCTTAAGAAACTTAAGTNGGAATCCCCCCCGGGGCCTTGCAAGGGAAATTCCGAATATTCAA
AGGCCTTTATTTCCGGATTACCCGGTNCGAACCCTTTTGAANGGGGGGGGGGCCCCCGGGTTANCC
CCAGCCTTTTTTGGTTT

| | |
|---|---|
| Sequence 654 | cMhvSG050g10a1 |

AGGTACGCGGGGATACTTTCTGAGAGTCCTGGACCTCCTGTGCAAGAACATGAAACATCTGAGGTT
CTTCCTNCTCCTGGTGGCAGCTCCCAGATGGGTCCTGTCCCAGGTGCAGCTGCAGGAGTCGGGCCC
AGGACTGGTGAAGCCTTCACAGACCCTGTCCCTGACCTGCACTGTCTCTGGTGGCTCCATCAGCAG
TGGTAGTTTCTTCTGGACCTTGGATCCGGCAGCCCGCCGGGAAAGGGACTGGNAGTGGATTGGGC
GAAATCCTTACCAGTGGGGAAGCACCGACTACAACCCCTTCCCTTCAAAGAAGTCCGAGTCTCCAT
TGTCAAGTTGGGAAGAAAGTCCCAAAGAACCAAGTTCTCCCTTGAANGTTTGAAGTTTCTCTTGAC
CCGCCCGTCANGACCGCCGGCCCGCTTCTTAGAAACTAAGTTGGGATCCCCCGGGCCTGGCAGGG
AATTCGATATTCAAGCTTANTCGAATACCCGTTCGTACCCTCGGAAGGGGGGGGGCCCGGTTACCC
CAGCTTTTTTGTTCCCTTTTAGTGGAGGGGTTAAATTGGCGCCGCCTTGGGCCGTAATCATGGGTCA
TTAAGCTGGTTTTCCTGTGGTGGAAAATTTGGTTTATCCCGCTCAACAAATTTCCCACAACAAACAT
TACCGAAGCCCGGGGAAGCCATTAAAANGTGTTAAAAAGCCCCTG

| | |
|---|---|
| Sequence 655 | cMhvSG052h11a1 |

AGGTACTGCATCTTTAATCTCTTGCTGGGCACGCCGCCCAGATTGGCCGAGGCCTCGCTCCGGACC
ATCGCAGACGCCGCCACTAGGAGAAGCAGCAGAAGCCTCATCTTAAATGAGCCAGCCACTT

| | |
|---|---|
| Sequence 656 | cMhvSG052h11a1 |

CGGTACCCAGCCTTTTGTTCCCTTTAAGTGAAGGGTTAATTGCCGCCGCTTGGCGTAAATCAATGG
TCATAAGCTGTTTCCTGGTGTGAAAAATTGTTATTCCCGCTTCACAAATTCCACACAAACCATTACC
GAGGCCCGGGGGAGCCAATAAAAGGTGGTTAAAAGCCCTTGGGGGGTGGCCNTAAATTGGAAGT
GGAAGGCCTAAACTTCACCAATTTAAAATTTGGCGGTTTTGCCGGCTTCAACTTGGNNCCCGCCTT
TTTCCCAAGNTCGGGGGAAAAAACCNTTGGTCCGGTGGCCCAAGCCTTGGCAATTTAAAATGGAA
AATTCG

| | |
|---|---|
| Sequence 657 | cMhvSG045d12a1 |

AGGTCGGCCGAGGTACGCGGGAACTCTGTCAACGAAGGCTTGAACCAACCTACGGACGACTCGTG
CTTTGACCCCTACACAGTTTCCCATTATGCCGTTGGAGATGAGTGGGAACGAATGTCTGAATCAGG
CTTTAAACTGTTGTGCCAGTGCTTAGGCTTTGGAAGTGGTCATTTCAGATGTGATTCATCTAGATGG
TGCCATGACAATGGTGTGAACTACAAGATTGGAGAGAAGTTGGGACCCGTCAGGGAGAAAATGGC
CAGATGATGAAGCTGCACATGTCTTGGGAACCGGGAAAAGGAGAAATTCAAGGTGTGACCCTCAT
GGAGGCAAACGTGTTACCGATGATNGGGGAAAGACCATTACCACGTANGAAGAACAGTTGGCAG
GAAGGGAATATCTCGGTGCCATTTGCTCCTGCACATGCTTTTGGGAGGCCAAGCCGGGGGCTTGGC
CGCTTNTGAACAAACTTGCCGCNAGAACCTGGGGGGTGAACCCCAGTCCCGAAAGGCACTACTGG
GCCAAGNCCTACCAGCCCAGTATTCTCAGNAGATTNCCATCCAGAAGAACCAAAACCCCTTAATG
GTTTNATTTGGCCCCCAAATTTGGAGGTGCCTTTTCATTGGCCCTTTTAAGAAATGTTACCCCTTGC
CCCCGGGGCCGGGGCCCNCTTCTTAAGAAACTTAGGTGGGGNATCCCCCCCCGGGGGCCTGGCAA
GGGNAATTTCCNGAATTTCCAANGCCTTTATTCCGAATTANCCGNTNCNAANCCTTCCNAANGGGG
GGGGGGGCCCCCGGGNTNNCCCCCAACTTTTTTTTGG

| | |
|---|---|
| Sequence 658 | cMhvSG040a08a1 |

AGGTACTTTAGGAGACCCAGGCGGGCAGATTGCCTGAGGTCAGGAGTTTGAGACCGGCCTGGCTA
ACATGGTGAAACCCTGTCTCTACTAAAAATACAAAAATTAGCCGGGCATGGTGGCTCACGCCTGTA
GTCCCAACTGCTTGGGAGGTTGAGGCAAGAGAATCGCTTGAACCCAGGAGGTGGGGGTTGCAGTG
AGCCGAGATCGCGCCACTGCACTCCAGCATGGGCGACAGAGCAAGACTCCATCTCAAAATAAAGA
AAGAAAGAAACAAAGAAAAGAAAAGCTTATATTGAACTTCTCTAAAAAAAGAAAAAAAAGAAAG
CCTGATGCACACAAATCTAAATTTGGCAAGTCGATCAATTAAAGGATATTTATTTGCATCACAAAA
TAATTCTTTACTCCCCCCAAAAATCAATAAAAAGTTCAAATAGCAACTTTTCCTAATGTGTTTAAA
ATGTAATCACCAAATACATGTGTCCCCAACTTTCTTTCCAGTTATAATTCTATTGGNGTAAAGGGA
NGTTACCTGGAAGTGAGGCAATAAAGAAGAGTTGAGCTTCANACCTGCCTGGAGAGAGCCGTGGT
TCTTTTTTTANAGTTTTGANGGAAATNGGTTNGGGGGCACCAAAATTNTTTTAAATCTTTTTT

| | |
|---|---|
| Sequence 659 | cMhvSG001e10 |

ACCCAGGATCTGGAAGGAAAGGGCCAAGCTGGGCTGTGGCATCCACTGGACCCTAGAGTCTTCAT
TGGGCAGGGGCCTCAGAAATCCACAAAAGACTCCCCAGTGGCTGTTCCTCTTTCCCAACGAGGCTT
GGACCCCCTTCCAGCCATTTGGGAACTCAAGCAGGAAGGAAGGTTCCTTAGGACAGGTTCCTGGC
ATGGCAGGTTCCCCTGGGAAGTGGTCGGAGGGCCCTCCCACCTTCTTGATGCCAGCAAGAAGTCA
AGGGCCTTTCCTGCTTCCCTGAGGACAACAATCAGGGCTTTCTTGCGGACTTGGGCCTTCTGGTTCA
CACTGGCAACGTTTCAGAACCCCAANGTACCCTCGGCCGGTTCTTAGAACCTAGTTGGGATCCCCC
CGGGCCTGCAAGGAATTTCCGATATTCAAGGCTTTATTCGGATACCCGTCCGAACCTCNAGGGGGG
GGGCCCCGGTTACCCCANNCTTTTTGGTTCCCTTTAAGTGGAGGGGTTTAATTTGCCGCCGCCTTGG
CCGTAAATNAATTGGGTCAATTAAGCTTGTTTTCCCTGTGGTGGAAAAATTGTTTAATTCCCGNTTC
ACAAATTTTCACAACAAACCATTACCNANNCCCGGGGAANCCATTAAAAGTGGTAAAAAGCCCTT
GGGGGTTGCCCCTAAATGGAAGTTGAAGCCTAAACTTCACAATTAAATTTGCCGTTTGNCGCCTCA
ACTTGCCCCGCTTTTTCA

| | |
|---|---|
| Sequence 660 | cMhvSG004f06 |

CCGCGGTGGCGGCCGCCCGGGCAGGTACAGAATGGCGGTCCTGCTGACTTGGCTGGGCTAGAGGA
TGAGGATGTCATCATTGAAGTGAATGGGGTGAATGTGCTANATGAACCCTATGAGAAGGTGGTGG
ATAGAATCCAGAGCAGTGGGAAGAATGTCACACTCCTAGTNTGCNNAAAGAACGCNTANNNTTAT
TNCCAANCTNNGAAAATCCCTATTGNTTCCTCCCTGGCTGATCCACTTGACACCCCTCCAGATTCTA
AAGCNATGTANTAGCGTTNTNAATCCCNNCCATNNCTNNGGNNNGGCCCAANGAACCGCGGCCCN
NCAGNTACCTTCTTGGCNCGNTCTANAACTANGTGGGGATCCCCCCGGGCCTGCAAGGGAATTTCG
ATATCAAGCTTAATCCGATACCCGTCGGACCCTCGAGGGGGGGGGGCCCGGGTACCCCAAGCTTTT
TTGTTCCCTTTAGTGGAGGGGTTTAATTTGCGCCGCTTGGCGTAAATCCATGGGNCAATAAGCTGT
TTTCCTTGTGGTGAAAAATTTGGTTNTTCCCGCTNCACCAAATTTCCCACCAACCAAACCATTACCG
ACCCCCGGNGGGANTCCANTTAAAAGGTGGTAAAAAACCCCNTNGGGGGGGTGGCCCCTNAANTG
GAAGNTGGANGCCTTAAACTTCANCATTTTAAAATTTGGCCGTTTGCCGCTTCACCTGGCCCCCGC
TTTTTCCAAGTTC

| | |
|---|---|
| Sequence 661 | cMhvSG008d05 |

TCCACCGCGGTGGCGGCCGCCCGGGCAGGTACGCGGGGAGACATACACTGGAGTGATGCAACTAC
AAACCAAGGAACACCAAGGACCACCAGCAATGACTAGAGCTAGGAGAGAGGCATGGAATAGATT
CTCCCACAGAGCTGCCAGAAGGAACCAGCATTGCCAACATCTTATTTCAGACTTCTAGCCTCCAGA
ATTGTGAGAGAATAAATTTTTGTTGTTTTCAGCCTTCCAATTTGTGATAATTTGCTATGGTAGCCCT
AGGAAAATAATACATCTGGATTCCAGCTTTCCACTCACATCATCGTTTTCTCCATCCTTCCCATGTC
TACATATTGTTGTTCCAGATTAAAGATATCTTGATGTCACAGGTGCTGGGAATTGTTTTTGTAACTC
TTTCTCTTGGTGGCTCTGTGGTGATTGACTCCCAAGGACAAAAGGANGCTTACCNNNAAAANNNN
NNNNNNNNNNNGTACCTCG

| | |
|---|---|
| Sequence 662 | cMhvSG009c03 |

AGGTACTCTCCAAGCTGCTCAAAAAGCTCACAATTTTGTTTGATTAAATTCTGAGGCTCTTCCACA
AGAGGTTTAAATTCATCGAACACTTTGGCATAGCATTCATGAGGATCTGCAGCGGCGCAGCACTTC
TCTAGAGTGGTTTCATATGTCTTGGCAAGTCTCAGCAGCAGCACGACAGAGTAATCAGGATGCCTT
CTTGCATATTCATACAAAAACATGCCCAGGAAGACATCCTTTGCCTCAGCATAGTTTTTGCAAACA
TCCTTACTTTCAACAAAATCAGCAGCCTAATGGAAGGCAAGTCAGCAGGGCATCTCATCATTTTCC
ACTTCGGCAATGCCCCTGGCGTACCTGCCCCGGGCGGCCCGCTCTAGAACTAAGTNGGGATCCCCC
CCGGGCTGCCAGGGAAATTTCGANTNTCAAAGCCTTATTCCGATTCCCGTNCGACCCTCGAGGGGG
GGGGGGCCCCCGGGTACCCCCAACTTTTTTT

| | |
|---|---|
| Sequence 663 | cMhvSG009c03 |

AGGTACTCTCCAAGCTGCTCAAAAAGCTCACAATTTTGTTTGATTAAATTCTGAGGCTCTTCCACA
AGAGGTTTAAATTCATCGAACACTTTGGCATAGCATTCATGAGGATCTGCAGCGGCGCAGCACTTC
TCTAGAGTGGTTTCATATGTCTTGGCAAGTCTCAGCAGCAGCACGACAGAGTAATCAGGATGCCTT
CTTGCATATTCATACAAAAACATGCCCAGGAAGACATCCTTTGCCTCAGCATAGTTTTTGCAAACA
TCCTTACTTTCAACAAAATCAGCAGCCTAATGGAAGGCAAGTCAGCAGGGCATCTCATCATTTTCC
ACTTCGGCAATGCCCCTGGCGTACCTGCCCCGGGCGGCCCGCTCTAGAACTAAGTNGGGATCCCCC
CCGGGCTGCCAGGGAAATTTCGANTNTCAAAGCCTTATTCCGATTCCCGTNCGACCCTCGAGGGGG
GGGGGGCCCCCGGGTACCCCCAACTTTTTTT

| | |
|---|---|
| Sequence 664 | cMhvSG015c09 |

CCGGGCAGGTACCTGGGAGTGGCCTTCTGTGCCTGCCACTGTGCTTCCCACATTGCTTAGTCACAC
ACATAACTGGGAGGTGCTGTGTTCCCAGTTTTTGTGAGTGCATTGAGCCCCTAGTGGTTCTACCCCT
TAGCAATAACTGTCCCTGGAACAGGTGTCATCACTGTAGAAATGCAGGTTACAGCCCTTGCAGAAC
ACANAGATTGGGCCCATGAATTACACCTGAGCTGCCCTNCTTTTGTTAATTGATGAGTTTGATCAA
GATCAGGAAGGTGGTGATGCAAAACCGGATGGCCTTAGACATAGTCACAGCTGCTCAAGGTGGCA
CCTGTGCCCTTGTANGGACAGAAGTGTTGTACCTTTNGCCGCTCTAAAAACTAGTNGATCCCCCGG
GGCTNGCAGGGAATTNGATAATTCAAANCTTTATTCGAATACCCGTTNNACCCNTCNGAGGGGGG
GGGGCC

| | |
|---|---|
| Sequence 665 | cMhvSG016d10 |

CGAACGCAGCCATAGCGCGGANAAGATGGCAACAGTTACCCCCGCGTACCTGCCCGGGCGGCCGT
GGCTGCCCAGACGTATTTGGCGTCGCAGTAGCCGACAATGGCGGCCTCCCGGCAGCAGCCATCGC
ACATCAGGTTATCCACGTAGCTCTGCCAACCGGCCATCTTCGAGCCCCCCCGCGTACCTCGGC

| | |
|---|---|
| Sequence 666 | cMhvSG017e10 |

ATTCATCATGGATGCTATGAGTNAGCCAGGGGGCAGGCTTGCCATGGGTTTTGTGACACCCCCATC
CAAAGCTCACCATGTTGCATCCCGCCCATTGTNTGNGGGACCCCAAGTTTCTAGCCATGTCCAGNT
CTTCACAAAAGCTGGATGCACATGCCAAGGCAAGCCATCCACAGCTGCTGCTGGAAGGGTGGTGC
AGATCTAACAGNNGGAGACATTGGCCACCTCAGCATAGGTGTGAGCCCAGNCCACAATGTTGTTG
GAGCATGCCAACCTGTGGCTG

| | |
|---|---|
| Sequence 667 | cMhvSG017f04 |

CCGGGCAGGTACGCGGGCGGGCTGAATAAAGCCGTGTCTCATCTACCTGCTGTNTCCCAAGTGTTC
TTCCAGCTCCCTGCCCCTNATCAACCNACTCTCCTCAGACCTCAGCTGGGGCTTGAACCTGATAATT
GGTGTAGTCATCAGGATGAGCTGTACCT

| | |
|---|---|
| Sequence 668 | cMhvSG025a06 |

GCGGCCGAGGTACTCTCCAAGCTGCTCAAAAAGCTAACAATTTTGTTTNGATTAAATTCTGAGGCT
CTTCCACAAGAGGTTTAAATTCATCGAACACTTTGGCATAGCATTCATGAGGATCTGCAGCGGCAC
AGCACTTCTCTAGAGTGGTTTCATATGTCTTGGCAAGTCTCAGCAGCAGCACGACAGAGTAATCAG
GATGCCTTCTTGCATATTCATACAAAAACATGCCCAGGAAGACATCCTTTGCCTCAGCATAGTTTTT
GCAAACATCCTTACTTTCAACAAAAATCAAGCAGCTAATGAAGGCAAGTCAAGCAAGGCCATTCT
CGGCATTTCCACTTCGGCCAATGCCCCGCGTACCTGCCCCGGGCCGGCCCGCTCTAGAACTAAGTG
GGATCCCCNCGGGGCTTGCAGGGAAATTCGATATTCAAGGCTTATTCGATACCCGTTCGACNCTCT
AGGGGGGGGGCCCCGGTTACCCCANCCTTTTGGGT

| | |
|---|---|
| Sequence 669 | cMhvSG025a10 |

TGGAGCTCCACCGNGGTGGCGGCCGAGGTCTCTCCAAGCTGCTCAAAAAGCTCACAATTTTGTTTG
ATTAAATTCTGAGGCTCTTCCACAAGAGGTTTAAATTCATCGAACACTTTGGCATAGCATTCATGA
GGATCTGCAGCGGCACAGCACTTCTCTAGAGTGGTTTCATATGTCTTGGCAAGTCTCAGCAGCAGC
ACGACAGAGTAATCAGGATGCCTTCTTGCATATTCATACAAAAACATGCCCAGGAAGACATCCTTT
GCCTNAGCATAGTTTTTGCAAACATCCTTACTTTCAACAAAATCANGCAGCTAATGAAGGCAAGTC
AGCCAGGCATCTCATCATTTTCCACTTCGGCAATGCAAGTGGGGATTTTTCCAACAAGAGGTTTTT
CACAGCATTCCTTTCAGTTTACTTGGAGATCGAAATCTTGGATTTTTCACAGATTATTACCTTGGGC
AAGGGTNCCGCCTATAAAGTAAGTTGGTGGGAAAATTGGTTCAACACCGANATTGGACATTTGGC
TAACCACTTTCTTCCCTTCAGGACCCTTTTATTTAAAGTTTGGGCCAGGAAACCATTATTTTCCATT
TGGNAATTTCCCCCCCCGGCGGTAACCNTTGGCCCNCGNGGGCCGGGGCCCGNCTTCTTAAGGAA
ACCTAAGGGTGGGGAATTCCCCC

| | |
|---|---|
| Sequence 670 | cMhvSG025f03 |

AGGTACAAATTGACCAGGCTGTTGACGGCTGCCTCCACGTCGGTGGAATAATTCTGACGAATCTGG
GAGCTCATGGTTGGTTGGCAAGAAGGAGCTAACCACAAAAACGGTGCCGGCAGGTCCCAGAAGCA
GGAGATGGCCGAGAAGATGGTCCCGGAGGTTGCAAGCGGAGAGGAAATCGGAGGGCGGTCGGAG
GCTGGAAGAGAGTCCCCGGATCTGTTCCGTCCAAACACTTGTTGAAGCAAGGAGACAGGACCCCG
CGGGACCGCCGAAACTTGCCCCCGCGTTACCCTGCCCGGGGCCGGCACGCTCTTAAGAAACCTAGT
GGGATCCCCCCGGGCCTGCAAGGGAATTCGATATTCAAGCTTTATTCCGATACCCGTCNGACCTTC
TGAGGGGGGGGGCCCCGGGTTACCCCAAGCCTTTTTGTTCCCTTTTTAGTGGAAGGGGTTTAAATT
TGGCGCCGCCTTTGGCGGTAAATCAATNGGGNCATTAAGC

| | |
|---|---|
| Sequence 671 | cMhvSG025f04 |

AGGTACGCGGGGGCAGTTCGGCGGTCCCGCGGGTCTGTCTCTTGCTTCAACAGTGTTTGGACGGAA
CAGATCCGGGGACTCTCTTCCAGCCTCCGACCGCCCTCCGATTTCCTCTCCGCTTGCAACCTCCGGG
ACCATCTTCTCGGCCATCTCCTGCTTCTGGGACCTGCCAGCACCGTATTTTGTGGTTAGCTCCTTCT
TGCCAACCAACCATGAGCTCCCAGATTCGTCAGGAATTATTCCACCGACGTGGAGGCAGCTCGTCA
AACAGCCTGGTCAATTTGTACCTTGCCCGGGGCGGCCGCTCTTAGAACCTAGTGGGATTCCCCCGG
GGCCTTGCAGGGAAATTCGATATTCANAGCTTAATCCGATTACCGTCGTACCCTANGNAGGGGGG
GGGGGCCCCGGTTACCCCAAGCTTTTTGGTTTCCCCTTTTANTTNGAGGGGGTTAAANTNTGGCGG
CCGCCT

| | |
|---|---|
| Sequence 672 | cMhvSG025g02 |

AGGGCGAATTGGACTCCACCGCGGTGGCGGCCGCCCGGGCAGGTACGCGGGTGCCCGACTCATCA
CAGAAACCAATTGCCAGCTGTGGGTGGTGGAGGAGCAGAGTGTTAGCCAAATCGATGGTGACTTT
GAAGACTACAAGCGGGAGGTGTTGGAGGCCCTGGGTGAAGTCATGGTCAGCCGGCCCCGAGAGTG
AAGCTTTCCTTCCCAGAAGTCTCCCGAGAGACATATTTGTGTGGCCTAGAAGTCCTCTGTGGTCTCC
CCTCCTCTGGAAGACTGCCTCTGGCCTGCAGCTTGACCTGGCAACCATTCAGGCACATGAAAGGTG
GAGTGTGGGCCTTGGATGTGGACCCGGGNATCCCACTCTTGATTGCATCCCATTTCTCTTGAAAAG
GACTTTGTTTTGTTTCTGCTTTCTTCTTNATATAAACTGGAGCCTGGGCCCTTATCCCTTTTGGGCAT
CCCCCCTTAAACAAAACAAGAGGGTGGACCACCCTTAATTGGTGAGGGTTCCNATCCCAGCCCAA
GTTTAATGTGGGCCCTATTGTTCTTCAAGGACTCTTCAATCNACTTCAAGNAANGCCCTGCCCTCTG
GATTTTAACCCCTTACAAGCTTTTCAAGGGCCCCANGCTTGGCCCCCCCCAAGATCTTTTTGGGGTN
GGGNGCCTNGTTCCTTTTTC

| | |
|---|---|
| Sequence 673 | cMhvSG025g03 |

TTGGAGCTCCACCCGCGGTGGNGGCCGCCCGGGCAGGTACTGTGAGGTTTGATTTGTGTGACAGA
ATCTGGCTTCCAGAAGTCAATCTGGGTCGTGCTGGTCAACTCGCGGATTATGTTAATGTGATTTTCA
TCTTCAACGTTAACACGGAACACCTTCTCGCCTTCAAAGTGCTCACCACCATGATGAGCAGATGCC
AGGGCCACAGTCACCAGAACCAAGAGTGCCAACATTGTGTCTGACCAGGTCTAGTGGGGTAAGGT
CTCATCTCCCGCGTACCTCGGCCGCTCTAAGAACCTAGTTGGATCCCCCGGGGNCTGCAGGGAATT
TCCGATATCAAGCCTTTATCGATTACCCGGTCGGACCTTCGGAGGGGGGGGGGCCCCGGTACCCAA
GCCTTTTTGTTTCCCTTTAAGTGGAAGGGTTTAAATTGGCGCCGCTTGGGCCGTTAATCATTGGGTC
CATTAGGCTGGTTTCCTGGTGGTGGAAAATTTGTTAATTCCGCTTCACCAAATTTTTCCACCAACCA
AACAATTACCGNAGGCCCCGGGGNAAGCCCANTTAAAAAGTGNTAAAAAGCCCCTTGGGGGGGT
GG

| | |
|---|---|
| Sequence 674 | cMhvSG032e06 |

CCGGGCAGGTACCACGATGTATAGAGCAACACTGGGGTAAGGTCACTGTGGGATGGTTGCCTGCT
GAGACCTGTGCAAACGTAACACATGCCACCATGCCAAGGATGTGGCCGGAACAAGCAGCCCTACC
AAGGCTGGGCCCCCATGGACTTTGTGCCTGCTGGGAGTTTATAGGTCTGTGGGGACATAGGATGGC
CATATCTTGCCAGCCAACTAGACTGGACATTGTACCT

| | |
|---|---|
| Sequence 675 | cMhvSG038d07 |

CCNGGCAGGTACACCTAACCAGNAACNGAAATCATTNTNTNAGNNNCCANANCACAGAATGNNCT
TGGTGAGATTGGCCNGCGGCNTTCGAGGAACTGATTGNTGCGGCAGNTNATNAGCACTTGNNTAT
TGNTCTTGACTGACTGNGTGAGCACAGAGAGTGGACCGGTGTTAAATTCCTCCTCCTCTCGCTTCT
GCAGCTTCCTCTGGGGCCATCTCACTCTTGGGCTTGNTGAGGAGGCTCATGGATGGTCACNTACGC
TCTCCGTTTCACTCCCGTTTTCCTCCGCCGTTNGCTTGCTGCCTTGAAGGGAGAAGCCCCNCNGTAC
CTCGGGCCCGCTTCTTAGAACTAGTGGAATCCCCCCGGGGCCTGCAGGGAAATTCCGATATCAAGC
CTTATTCGATACCCGTCGACCTTCGNAGGGGGGGGGNCCCGGNTACCCANGCTTTTGTTCCCCTTT
AGGTGAGGGGTTTAATTTGCCGCGCCTTGGCGTAATCATGGGTCATTAGGCCTGTTTTCCTGGTGT
GNAAATTGTTAATCCCGCTCACAAATTCCCACAACCAAACCATTAACGGANGCCCGGGGGAAGCC
ATAAAAAGTNGTTAAAAAGCCCCTNGGGGGGNTGGCCCTAAAATGAAGTNGAAGCCTTANACCTT
CAACAATTTTAAATTTGGCCGTTTNGNCGCCTTCAACTTTGGCCCGGNTTTTTCCAANTTTCCGGGG
AAAAACCCTGGTTCGTGGCCCCAGCCTTGGCATTTNAATTGGAAATTCGGNCCCAAACNCCCCCNN
GGNGGNAAAAAGGCCGGGTTTTGCCANAATTNGGGGCCGCCTTTTTTCCCC

| | |
|---|---|
| Sequence 676 | cMhvSG038g04 |

ACGCGGGGACATTTTCTCGGCCCTGCCAGCCCCCAGGAGGAAGGNGGGTCTGAATCTAACACCAT
GACNGAACTAGAGACAGCCATGGGCATGATCATAGACGTCTTTTCCCGATATTCGGGCAGCGAGG
GCAGCACGCAGACCCTGACCAAGGGGGAGCTCAAGGTGCTGATGGAGAAGGAGCTACCAGGCTTC
CTGCAGAGTGGAAAAGACAAGGATGCCGTGGATAAATTGCTCAAGGACCTGGACGCCAATGGAG
ATGCCCAGGTGGGACTTCAGTGAGTTCATCGTGTTCGTGGCTGCAATCACGTCTGCCTTGTCACAA
GTACCTTGCCCGGGCCGGCCGCTCTAGAACTAGTTGGGATCCCCCGGGCTGCAGGGAATTTNCGAT
ATCAAGCCTTATCGATACCCGTCGACCCTCGAGG

| | |
|---|---|
| Sequence 677 | cMhvSG038g04 |

CTTTAGTGAGGGTTAAATTGCGCGCTTGGCGTAAATCATGGTCATAGCTTGTTTTCCTGTTGNGAA
ATTGTTATCCCGCTTCACAAATTTCCACACAAACAATACGGAAGCCCGGGNGCCANTAAAAGTGTT
AAAAAGCCCTGGGGGGTGCCTTAAATGGAAGTNGAGCCTAACCTTCACATTTAATTTGCGGTTTGC
CGCCTNCAACTGGGCCCGCTTTTCCCANNTCCGGGGAAAACCCTTGTTCCGTNGCCCANCCTTGCC
ATTTTAANTGAATTCNGGCCNNACCCCC

| | |
|---|---|
| Sequence 678 | cMhvSG038g06 |

AGGTACGCGGGAGTGCCCCAGGAGCTATGACAAGCAAAGGAACATACTTGCCTGGAGATAGCCTT
TGCGATNTTTAAATGTCCGTGGATACAGAAATCTCTGCAGGCAAGTTGCTCCAGAGCATATTGCAG
GACAAGCCTGTAACGAATAGTTAAATTCACGGCATCTGGATTCCTAATCCTTTTCCGAAATGGCAG
GTGTGAGTGCCTGTATAAAATATTCTATGTTTACCTTCAACTTCTTGTTCTGGCTATGTGGTATCTT
GGATCCTAGCATTAAGCAATATGGGTACCTGCCCGGGCCGGCCCGCTCTAGAAACTAGTGGGATC
CCCCCGGGCCTGCAGGGAATTC

| | |
|---|---|
| Sequence 679 | cMhvSG038g06 |

CNACCCTCNAGGGGGGGGCCCGGGTACCCCAGCTTTTTTTGTTCCCTTTAAGTGAAGGGGTTTAAA
TTTGCCGCCGCTTTGGCCGTAATCATGGGNCAATTAGGCCTGGTTTTCCCTGGTGGTGGAAAATTN
GTTTATTCCCGCTCACCAAATTTCCCNCACAAACATACCGAAGCC

| | |
|---|---|
| Sequence 680 | cMhvSG039d04 |

GCTCCACCGCGGAGGCGGCCGAGGTACNCGGGGGCTGAATAAAGCCGTGTCTCATCTACCTGCTG
TCTCCCAAGTGTTCTTCCAGCTCCCTGCCCCTCATCAACCCACTCTCCTCAGACCTCAGCTGGGGCT
TGAACCTGATAATTGGTGTAGTCATCAGGATGAGATTTAGAAGTGGTGGTGCCCCTCTTGTGACAG
CATTTGGCAGTGTGCAGTTGGGCCATCAATAAATCCAAGGTCCAAGGGAACANATGAAAAAAAAA
AAAANAAAAAAGT

| | |
|---|---|
| Sequence 681 | cMhvSG039d04 |

GAATTCNATATCAAGCTTTTCTATACCGTNTACCTTCGAGGGGGGGGGC

| | |
|---|---|
| Sequence 682 | cMhvSG041h07 |

CAGGTACGCGGGATCTATGAGAAGAAGTNTGGCCAAGTCCCCATGTGTGACGCCGGTGAGCAGTG
TGCANTGAGGAAAGGGGCAAGGATCGGGAAGCTGTGTGACTGTCCCCGAGGAACCTCCTGCAATT
CCTTCCTCCTGAAGTGCTTATGAAGGGGCGTCCATTCTCCTCCATACATCCCCATCCCTCTACTTTC
CCCAGAGGACCACACCTTCCTCCCTGGAGTTTGGCTTAAGCAACAGATAAAGTTTTTATTTTCCTCT
GAAGGGAAAGGGCTCTTTTTCCTGCTGTTTCAAAAAATAAAAGAACACATTAGATGTTTACTGTGT
GAAAGAATAATGCCTTGTATGGGTGTTGATACCGTGTGTGAAGTATTCTTATTTTATTTNTCTGACA
AAACTCTTGTGTACCTNGGGCCGCTCTAGAAACTANTGGGATCCCCCCCGGGCCTTGCAAGGAAAT
TTCNAATATCAAAGCCTTATCCGATACCCCGGGNCGGACCCTTCGGAAGGGGGGGGGGCCCC

| | |
|---|---|
| Sequence 683 | cMhvSG048a02 |

ACCTGCATCAGCATTAGTAATCAACCTGTTAATCCAAGGTCTTTAGAAAAACTTGAAATTATTCCT
GCAAGCCAATTTTGTCCACGTGTTGAGATCATTGCTACAATGAAAAAGAAGGGTGAGAAGAGATG
TCTGAATCCAGAATCGAAGGCCATCAAGAATTTACTGAAAGCAGTTAGCAAGGAAAGGTCTAAAA
GATCTCCTTAAAACCAGAGGGGAGCAAAATCGATGCAAGTGCTTCCAAGGATGGGACCACACAGA
GGCTGCCTCTCCCATCACTTCCCTTACATGGAAGTATATTGTCAAGCCCATAATTGTTTCTTAAGTT
TGCAGTTACCACTAAAAGGTGACCCAATGATTGGTNACCAAATCAGCTGCTACTTACTCCTGTAGG
GAAGGGTTAAATGTTCATTCCATCCTAAGGCCTATTCAAGGTAATAACTCTTACCCTGGGCACTTA
TAATGGTTAAAGCCTTCTACTGAGGGTGCTATTGTTCCTTTAAGNGGGATGGTTCTGACCCTTGCTT
CAAATATTTNCCCTCACCTTTTCCCAATCTTTCCCAAGGGGTACCCNTGCCCCGGGGCCGGGCCCG
CTTCTTANGAAACCTAAGTGGGATTCCCCCCCGGGGCCTTGCAAAGGAATTTCNNATTATCCAAGC
CTTTATTCGGANTACCCCGTCCGACCCTTCGNGGGGGGGGGG

| | |
|---|---|
| Sequence 684 | cMhvSG048g01 |

TCCACCCGCGGTGGCGGCNCGANGTNCGCGGGGCCNGCTGGTAGTAATTCCGCTTCCTGTCCGACT
GTGGTGTCTTTGCTGAGGGTCACATTGANGCTGCAGGTCTGAATCCGGGGTGCCTTTAGGATTCAG
CACCATGGCGGAAGACATGGAGACCAAAATCAAGAACTACAAGACTGCCCCTTTTGACAGCTCGC
TTCCCCAACCAGAACCAGACTANGAAACTGCTGGCAGAACTACCTGGACTTCNCACCGCTGTCAG
GAAGGCAATTGACCCGCTAAAGGGAGGCCGAATATCTCTTGTGTGCCGAATGGGTACCCTTGCCC
GGGGCCGGCCCGCTTCCTAAGAAACCNAAGNTGGGATGCCCCCCNGGGCTTGGCANGGGAAATTT
CGGATATTCAAAGGCTTTATCGGATAACCCGTNCCGACCCTTCTGAGGGGGGGGGGGCCCCCGGT
NNCCCANCTTTTTTGGTTCCCCTTTTANTGGAANGGGGTTTAAATTNGCCGCCGCTTTGGGCCGTAA
ANTCAATTGGGTTCCATTAGCCTTGTTTTTCCCTGGTGGTGGAAAAANTTGNTTTAATTCCCGCTTT
CACC

| | |
|---|---|
| Sequence 685 | cMhvSG050a07 |

CCGGGCAGGTTCGCGGGGGACATTTTCTCGGCCCTGCCAGCCCCCAGGAGGAAGGTGGGTCTGAA
TCTAGCACCATGACGGAACTAGAGACAGCCATGGGCATGATCATAGACGTCTTTTCCCGATATTCG
GGCAGCGAGGGCAGCACGCAGACCCTGACCAAGGGGGAGCTCAAGGTGCTGATGGAGAAGGAGC
TACCAGGCTTCCTGCANGAGTGGAAAAGACAAGGGATGCCCGTGGATAAATTGCTCAAGGGACCT
GGACGCCCAATGGGAGATGCCCAGGTGGGACCTTCAGTGGAGTTCATCGTGGTTCCGTTGGCTTGC
AATCACCNTCTGGCCCTGTCACAAGTTACCTTCGGCCCGCTTCTAAGAAACTTANTGGGATCCCCC
GGGGCTTGCAANGGAAATTTCGGATATTCAAAGCCTTTATTCCGAATACCCCGTTNCGAACCTTNN
NNAGGGGGGGGGGCCCCCCGGGTTACCCCCAAGCCTTTTTT

| | |
|---|---|
| Sequence 686 | cMhvSG050a09 |

CGAGGTACGCGGGAGAGGCGACTGTCCCCACCTGAATGCTTAAATGCCTCGTTACTGGGAGGTGTT
CTCAGAAGAGCCAAATCGAAAAATGGAGGCCGGTCCTTGCGGGAGAAGTTGGACAAGATTGGGTT
GAATCTTC

| | |
|---|---|
| Sequence 687 | cMhvSG050a09 |

GTCATTAGCCTGTTTCCCTGTGTGGAAATTGTTATCCCGCTCACAATTTCCACACAAACATTACCGA
AGCCCGGGGAGCATTAAAAGTGGTAAAAGCCCTGGGGGGTGCCCTAATGAAGTGGAGCTAACTCA
CATTAAATTGGCGTTTGGCGCTCACTGCCCGCTTTTCCAAGTCCGGGGNAAACCCTTGTTCGTGCCC
AAGCNTGCATTAATGAAATCGGCCAACCGCNCCGGGGGAAGAA

| | |
|---|---|
| Sequence 688 | cMhvSG052a02 |

CCACTAATTCAAGGACTCTTACCGTGGGAGCAACTGCTGGTTCTATCACAATGAAACCGCTGGNTT
GTGTGCTCTTGGTGCGCTCCTCTGCAGTGGCACAGTTGCATAAAGGATCCTACCCTGNGATCACCA
CTGGCATCTNTGGAAGAAAACCTATGGCAAGACAAATACAAGGGAAAAAGAATGAAGAAGCAGT
ACCTGNGGCCCGCTCTTAGAACTAGNGGGGATCCCCCCGGGCCTGCAAGGGAATTCCGATATCAA
GNCTTATCGAATACCCGTNGACCTTNNGGAGGGGGGGGGCCCCG

| | |
|---|---|
| Sequence 689 | cMhvSG053a09 |

CGAGGTACTCTCCAAGCTGCTCAAAAAGCTCACAATTTTGTTTGATTAAATTCTGAGGCTCTTCCAC
AAGAGGTTTAAATTCATCGAACACTTTGGCATAGCATTCATGAGGATCTGCAGCGGCACAGCACTT
CTCTAGAGTGGTTTCATATGTCTTGGCAAGTCTCGGCAGTAGCACGACAGAGTAATCAGGATGCCT
TCTTGCATATTCATACAAAAACATGCCCAGGGAAGACATCCTTTGCCTCAGCATAGTTTTTGCAAA
CATCCTTACTTTCAACAAAATCAACAGCTTAATGGAAGGCAAGGTCAAGCAGGCCATCTCATCCAT
TTTCCACTTTCGGCAATCCCCGCCGTACCTGCCCCGGGCCGGCCCGCTCTAGGAACTAGTGGGATC
CCCCCGGGCTGCAGGGAATTCCGATATCAAAGCCTTATCGATACCCGTCGGACCTCGGAGGGGG

| | |
|---|---|
| Sequence 690 | cMhvSG053a09 |

AGTGGAGGGGTTAATTGCGCCGCCTTGGGCCGTAAATCCATGGGGCCATAAGCCTGNTTTCCCTGT
GTGGAAAATTGGGTATCCCGCTCACAAATTTCCCNCACCAACCATTACCGAAGCCCGGGAAGCCA
TTAAAAGNTGTGAAAAGCCCTGGGGGGTGGCCCTAAATGGAGTGGAAGCCTTAAACCTNACCATT
TAATTTTGGCCGTTTGGCGGCCTCACCTTGCCCCCGGCTTTTTCCCAAGTTCGGGGGAAAAANCCCT
GNTCCGNTGGCCCCAGCCTGGCATTTAAATGGAAATTCGGGCCCCAACCCCCCCCCGGGGGAANA
AGGCCCGGTTTTGCCCTATTT

| | |
|---|---|
| Sequence 691 | cMhvSG053d10 |

ATTGGACTCCACCGCGGTGGCGGCCGCCCGGGCAGGTTCNCGGGACATTTTCTCGGCCCTGCCAGC
CCCCAGGAGGAAGGCGGGTCTGAATCTAGCACCATGACGGAACTAGAGACAGCCATGGGCATGAT
CATAGACGTCTTTTCCCGATATTCGGGCAGCGAGGGCAGCACGCAGACCCTGACCAAGGGGGAGC
TCAAGGTGCTGATGGAGAAGGAGCTACCAGGCTTCCTGCAGAGTGGAAAAGACAAGGATGCCGTG
GATAAATTGCTCAAGGACCTGGACGCCAATGGGAGATGCCCAGGTGGACTTCAGTGAGTTTCATC
GTGTTCGTGGCCTGCAATTCACCGTCTNGCCTGTCACAAGGTACCTTCGGCCGCTCTAAGAACTAG
TGGGATCCCCCGGGGCTGCAGGGAATTCCGATATCAAGCTTATCCGATACCCGTCGACCTCGAGGG
GGGGGGCCCCGGTACCCCAAGCTTTTGTTCCCTTTAAGTGAGGGGTTAAATTTGCCGCGCTTGGCG
TAATCATGGGTCAATAAGCTGTTTTCCTGTGTGAAAATTGTTTATCCCGCTTCACAAATTCCACACC
AACCATTACCGAGCCCGGGAGCATAAAAGTGTAAAAGCCTGGGGTGCCCTAAATGAAGNGGAGCC
TAACCTCACATTTAATTGCCGTTTGCGCTCACTTGCCCCGCTTTTCCAAGTNCGGGGAAAAACCCTG
GTCCGNGCCCAGCTTGCATTTAAATGGAAATTCNGGCCCAACCCCCCCCGGGGGAAGAAGGCCCG
TTTTTGCCNTTNTTTTGGGGCCGCCTTT

| | |
|---|---|
| Sequence 692 | cMhvSG053h06 |

CCGGGCAGGTACTTGCAATGGGGCCACCATGTTTTCTCCCATTAGCCAGCCCCATTCATCATGGAT
GCTATGAGTCAGCCAGGGGGCAGGCTTGCCATGGGTTTTGTGACACCCCCATCCAAAGCTCACCAT
GTTGCATCCCGCCCATTGTCTGTGGGACCCCAAGTTTCTAGCCATGTCCAGTNCTTCACAAAAGCT
GGATGCACATGCCAAGGCAAGCCATCCACAGCTGCTGCTGGAAGGGTGGTGCAAGATCTAACAGT
TGGAGGACANTTGGGCCACCTCANGCATAGGNGTGGAGCCCAAGTCCACCAATGGTTTGTTTGGA
AGCATTGCCAAACCCTGTGGGCTTGAGCCAAAAATAACTCCCCAAGNAATTNTGGNCAANACAAT
TCCCGGCCCCTTGGACCTTTGGNATTTAATTTGATGGCCCCAACTTGCACACTGGCCCAAANGANN
TNCTCACTAAGAGCGNGGCCACCAACCCAACTTNTATAAAAANGCTCATTCCCTCGATGGAACTA
ACACCCAAANTTTATCNAGGGTTTTCAAAGCCCCCCAGCTTGGAAGGGTCCTGGAGGGAAAAAGT
TGGGGTTTTGAATGGAATGGGGGCCNANGGGNAAGCCTTGGGAAAGGAAANCAACTTGNGGGGA
NGACNANGCCANGGTTNGGANGAAGAACAACGGGCNTTTTATTTCAANCCCCCCCGCCNTNNCCC
TTANGGGGCCGGTNTNTTAANAAACCTNANNGGGGATCCCCCCCGGGGNCCTTGGNAAGGNAANN
TTANATANTCCANGNCTTAAANGGANTNCCCGGGNATAAACCTTNTAANGGGGGGG

| | |
|---|---|
| Sequence 693 | cMhvSG055f03 |

CACCGCGGTGGCGGCCGAGGTACGCGGGCTGGGCAAGGCAGACTTCTCTGGAATGTCCCAGACAG
ACCCGTCTCTGTCCAAGGTCGTGCACAAGTCTTTTGTGGAGGTCAATGAGGAAGGCACGGAGGCT
GCAGCCGCCACAGCTGCCATCATGATGATGCGGTGTGCCAGATTCGTCCCCCGCTTCTGCGCCGAC
CACCCCTTCCTTTTCTTCATCCAGCACAGCAAGAACCAACGGGATTCTCTTCTGCGGCA

| | |
|---|---|
| Sequence 694 | cMhvSG055f03 |

CTGCAGGGAATTCCGATTATTCAAGCCTTATCCGATACCCGTCGACCCTACGAGGGGGGGGGCCCC
GGTACCCCAGCTTTTGTTCCCCTTTTAGTTGAGGGGTTTAAATNTGCNCCGCCTTGGCCGTAATCAA
TGGGNNCATAGCTGGTTTTCCTGTGTTGAAAAATTTGTTTATCCCGCTCACCAATTCCACANCAAA
CATACGAAGCCCGGGGTAGCCATAAAAGTTGTTAAAGCCCTGGGGGTGCCTTAAATGAAGTTGAA
GCCTAAACTCNACATTTAAATTTGGCNGTTTTGGCGCTTCAANTTGNNCCCGCTTTTTCCCAGTTCC
GGG

| | |
|---|---|
| Sequence 695 | cMhvSG058f07 |

NCNNGCCAGGTACGCGGNGGAAANGGGAGTGANNNAAGAGCNTAGTGANCATCATGAGCCTTCT
NNACAAGCCNAACANTGATATGACCCCAGNGGAGCNGCNCANGCGAGAGGAGGGGGAATTTANC
ACCGGTCCACTCTTTNTGCTCACACAGTNANTCAAGAACAATACCCAAGTGCTTATCAACTGCCGC
AACAATAAGAAACTCCTGGGCCGCTGAAGGCCTTCTATAGGCACTGNAACATGGGNGCTGGAGAA
CGTCTAAGGAGATGTGGACTGANGTACCTTTGCCGGCCGGGCAGGTACCAGAATATAGGTTCCCA
AATAGATCCCTGGTTTGTCTTTAGAGACACTGAAGGGGACAACAATAGCCAATTCGGGATTTCAAA
CACCCCACAAACTATACCTTAGGCTCTGTGAGGGCAAAAGACACAGTTTATTTCAACAACGATCTT
GTTCAACAGAACCTGGTCACCAAGTGGATNGATGGATGGGGCCAGACCCANATTGGGACAAGAAC
TACTTCAAGTGGGGTGGGCTACATTGTGCTTTGCCTTGCCCCCGGGAACACCATTGNACTTCACNT
TTTTGCAATTGCTTACATTANAACTANAAGTTTTGGCTTNCATTCAATTGAAAAATANNATAAGTT
NTNGGCANTTGAAAAACCTTAACAAAAAACCCTTTTTACCCCCGGCGTTTNCCTTTGGGGCCGGTT
TTANAAACTANTTGGATTTCCCCCCGGGCTTTGCANGGAAATTTCGATTATNCAAGCCTTTNTTTGA
NTACCCGNCCAANCCTNCNAAGGGGGGGGG

| | |
|---|---|
| Sequence 696 | cMhvSG064b12 |

TATAGGGCGAATTGGAGCTCCCGCGGTGCGGCGCCGGGCAGGTCATAATCGTTTTGTGGAGTCGC
ACAGTTCAGGTTATGGAGGCCCGTAATTACCAAAGTGTAAAAAAGGGCAAAGGAAACACNCCTNC
ATTGTAGAATAAGGCATTCAAATGTGCTGTTACCGTTTAAAGGCAGCTAATGNCAAAACAGGCAA
GTCAAGAAAAGTGGTCTGGTTTTGGAGGTGATTTTGCATCTAGAAGCATTCTCTTCTCGTGCCTCA
AAGNCTGACCACTGTAGAGCATGTCTTCTTCCTCAAGGCCAATGATACTTCAGATCCCAGATGGTT
TCATTTTTCAATTGCGGTCCAAAGAGAGGGTTGAGTTGGGCCAGAATTGCAATCAGCCAAAAGAG
ATAGCAGCAACCTGACCAGGTCACCACCATGGTAATGTAACTCCCCGGTAGGACCCTTANGGATG
AACCAAGGCCCAAGAAGCC

| | |
|---|---|
| Sequence 697 | cMhvSG064f04 |

CTTTNGGCGATTGGNNCTCCCCGCGGTGGCGGCCGAGGNANAATAGACAGCGCAGCAAANAGAA
GGCGCGGGCTGGGTGGGAAGAGGATTCGGACTCGTCACACTGCAGAGCAGCAGAGCGAGAAAGG
ATGAGAAGAGGCAGAGAAGGCGACGGCAGAAAGAAAAAGGAAAACTGCGGCCGAGGACTTNNTT
TTTTTTTTTTTTTTTTTTTTTTT

| | |
|---|---|
| Sequence 698 | cMhvSG067g04 |

GCAACACTGGGGTAAGGTCACTGTGGGATGGTTGCCTGCTGAGACCTGTGCAAACGTAACACATG
CCACCATGCCAAGGATGTGGCGGAACAAGCAGCCCTACCAAGGCTGGGCCCCCATGGACTTTGTG
CCTGCTGGGAGTTTATAGGTCTGTGGGGACATAGGATGGCCATATCTGCCAGCCAACTAGACTGGA
CATTGT

| | |
|---|---|
| Sequence 699 | cMhvSG070b06 |

CCGGGCAGGTACGCGGGACCTGGTCAGACACAATGTTGGCACTCTAGGGGGATGGTGACTGNGGC
CCTGGCNTNTGCTCATCATGGTGGTGAGCACTTTGAAGGCGAGAAGGTGTTCCGTTGTTAACGTTG
AAGATGAAAATCACATTAACATAATCCGCGAGTTGGCCAGCACGACCCANATTGACTTCTGGAAG
CCAGATTCTGTCNCACAAATCAAACCTCACAGTACCTCGGCCGCTCTAGGAACTAGTGGATCCCCC
GGGNCTGCAGGAAATTCGATATCAAAGCTTTATCGGATACCCGTCNGACCTTCGAGGGGGGGGCC
CNGGTACCCCAGCTTTTTGTTCCCCTTTAAGTGGAGGGTTAAATTGGCGCGGCCTTGGGCGTTAAT
CCANTGGTTCAATAAGCTNNTTTTCCTGGGGTNGAAAATTTGNTTATTCCCCGCTTCAACAAATTTC
CCAACACCANACAATAACCGNAGTCCCGGGGGGAGGCCATTACAAGTTGGTTAAAAAGCCCCTTG
GGCGGTNGCCCTTNAATGGAAGGTGGAAGCCTTAANCTTTCACCATTTAAATTT

| | |
|---|---|
| Sequence 700 | cMhvSG070c06 |

TATAGGGCGAATTGGACTCCACCGCGGTGGCGGCCGAGGTACCCAGGATCTGGAAGGAAAGGGCC
AAGCTGGGCTGTGGCATNNACTGGACCCTAGAGTCTCATTGGGCANGGCCTCAGAATCCACAAAG
ACTCCCCAGTGCTGTTCCTCTTCCAACGAGGCTGGACCCCTTCCAGCCATCTGGGAACTCAAGCAG
GAAGGAAGGTTCCTTAGGACAGGTTCCTGGCATGGCAGGTTCCCCTGGAAGTGGTCGGAGGGCCC
TCCCACCTCTTGATGCCAGCAGAAGTCAGGCCTTCCCTGCTCCCTGAGGACACATCAGGGCNTTCT
TGCGGGACTTGGTCTTCTGGTTCACACTTGGCACGTTCCAAGACCCAGGTACCTTGCCCGGGCGGC
CCGCTTCTAGAAACTAAGTGGGGATCCCCCCCGGGCCTGCCAGGGAATTTCGATATCAAAAGCTTA
TCTGAATACCGTCCGACCTTCGAGGGGGGGGGCCCCGGGTACCCANCTTTTTGTTCCCTTTTAGTG
GAGGGTTAAATTGGCGCCGCCTTTGGCCGTAAATCATTGGGTCAATAAGCCTGNTTTTCCTTGTGTT
GAAAAATTGGTTTATTCCGCTTCAACAAATTCCCACACAAACAATTAACGAAGCCCCGGGGANGC
CATTNAAAAGATGGTAAAAGGCCCTGGGGGGGTNGCCCCTAAATGGAGGTGGAAGCNTTAACCTT
ACCATTTAAATTTGCGNTTTTGCGGNCTTNACTTGNCCCCGTTTTTTCCAAGGCCCGGGGAAAAAC
CCTTGTTCNTTGCCCCAGCCTNGCATTTAATTGAAATNGGGCCCAACTCCCCCCGGGGGAAAAAAG
GC

| | |
|---|---|
| Sequence 701 | cMhvSG070h03 |

ATTGGACTCCACCGCGGTGGCGGCCGAGGTACAGTTTTCTCAGAAGACTCAAGATTTCGCCCACAT
CCCTTNGAGNNCCCGCTAGATCTGCCGCCCGGNTNCATTTGTCCCACTCTTCAGGACAGAGTTAGC
TGCCCTCTTTCTTTACTTCATAGTCTTTGTAAGGGCTCGGCCAAGCGTGGGCCCGTGGGATGGAGA
ATTCCTTTTGGGGAGGCTGGTTCTGCAGCTGAAAATGTGTGGAATAGGGGGCATAGAGCGTGTCCC
CTGTCTCTTCAAAACCTTGAGGTGATTTCCTCTTGAGGGGTAGGCTCTGTTCTCCACACCATAAGCT
CTTTCTTCACCGAAGTTGAGGTTTACAGGAAAGCCATCCCTCCAACAGGGATAAATCCCATGGGGG
GTTTCGTTGCTTTGTGAGCAAGCCANAAAACTCCGGGGGACCTAACANTAAAACCAACCAAGGGA
ACACCNCAGCCAATTGGGCCAGCCAANGGCGGGAGCTTGAAGGGATGGTGGTCATTCCCACCCTG
CCGGTCAAAAGGTTCAAGGGAAACATTGANGCAGGGGTNGATCCCAGGGCCCACCCCAGAATGG
GCAATGGGAAGAAGGGAAGCATCCGTTGAAGGGTAAAAATGNTGGGGGCCC

| | |
|---|---|
| Sequence 702 | cMhvSG070h10 |

CCGGGCAGGTACGCGGGGAGTCCCCACCTCTCTCAGCTTCCGGCTGGTAGTAGTTCCGCTTCCTGT
CCGACTGTGGTGTCTTTGCTGAGGGTCACATTGAGCTGCAGGTTGAATCCGGGGTGCCTTTAGGAT
TCAGCACCATGGCGGAAGACATGGAGACCAAAATCAAGAACTACAAGACCGCCCCTTTTGACAGC
CGCTTCCCCAACCAGAACCAGACTAGAAACTGCTGGCAAGAACTACCTGGACTTCCACCGCTTGTC
AGAAGGCAATGACCCGCTAAAGGAGGCCGATATCTCTGTGTTGCGGAATGGTACCCTCGGCCGGN
TCTANAACTAGTGGATCCCCCGGGGCCTGCAGGAAATTCGATATCAAGCCTTATTCGATACCCGTT
CGACCTTCGNAGGGGGGGGGGCCCCGGTACCCCAGCCTTTTTGTTCCCTTTTAATGAGGGGTTAAA
ATTTGCCGCCGCCTTGGGGCGTAAATTCATGGGTCAATTAGCCTGTTTTTCCTTGNNGTGGAAAAA
TTTGTTTATTCCCGGCTTNAACAAATTTNCCACCACAAACCATTACCGNAGCCCGGGGNAGGCCAN
TAAAAAGGTGGTTAAAAAGGCCCTTNGGGGGGTGGCCCCTNAAATGGAAGNTGGAAGGCCTAAA
CCTTCAACAATTTAAAATTNGCCGGTTTGGNCGNCTTCACTTGGCCCCGCTTTTTCCAANTTCGGGG
GAAAACCCTTGNTCCGTTGGCCNNGCTTGCAATTTAAATTGAAAATCCGGCCCAACCCCCCCCGGG
GGAGGAAGGGCCCGGT

| | |
|---|---|
| Sequence 703 | cMhvSG072a01 |

AGGTACGGAGCAATCGAGGAGGCATAACCACACTTGGGGTGGCTATAGGGCTGGAAAACGCTGA
AGATGACTGCTTTCACTGAGGTTAAGGATTGTAATATTGCCAGCTTTGTAAAGTCATTAAAGCAGA
AGTTTCTTCAGTGATCTTCTCTCTAAGAAACACCATCACCTCCATGTGCCTTACAGAGGCCCCCCCG
CGTACCTGCCCGGGCGGCCGNTCTAGAACTAGTTGGATCCCCCGGGCTGCAGGTAATTCGGATATC
AAGCTTATCCGAATACCCGTCGACCTCTGAGGGGGGGGGCCCCGGTTCCCAAGCTTTTTNGTTTCC
CTTTTAGTNGAGGGGGTTAAATTTGCCGCGCTTTGGCGTTAANTCATTGGGGTNCAATANGCTTGG
TTT

| | |
|---|---|
| Sequence 704 | cMhvSG072a04 |

ACAAGGTGCTAAAACAGGTTCACCCCGATACTGGCATCTCATCCAAGGCCATGGGCATCATGAATT
CCTTCGTTAACGACATCTTCGAACGCATCGCAGGCGAGGCTTCCCGTCTGGCCCACTACAACAAGC
GCTCGACCATTACCTCCAGGGAGATCCAGACCGCCGTGCGTCTGCTGCTTCCCGGAGAGCTGGCCA
AGCACGCAGTGTCCGAAGGTACCTCGGCCGCTTCTAGAACTAGTGGGATCCCCCGGGCTGCAGGG
AATTCGATATCAAGCTTAATCGATACCCGTCGACCTTCGAGGGGGGGGGCCCCGGTACCCAAGCTT
TTGGTTCCCCTTTTAAGTNGAAGGGGTTAAATTGCGCCGCTTTGGGCGGNAAATTNATTGGGTCAA
TAAGCTNGTTTTTCCCTGGNGGGTGGAAAATNTGGNTTATTCCCGGCTTCAACCAAATTTTTCCCA
NCAACCAAAACAATTACCGGAANGCNCNGGGGAGGCCAATAAAAAAGGTTNGTTAAAAGGCCCT
TGGGGG

| | |
|---|---|
| Sequence 705 | cMhvSG072h03 |

TTGGAGCTCCACCGCGGTGGCCGGCCGAGGTACGCGGGCATGCTGGAGATGGACAACTCAATGAA
AATTTAAAGGGAAAACCCTCAGGCCTGAGGTGTGTGCCACTCAGAGACTTCACCTAACTAGAGAC
AGTCAAACTGCAAACCATGGTGAGAAATTGACGACTTCACACTATGGACAGCTTTTCCCAAGATGT
CAAAACAAGACTCCTCATCATGATAAGGCTCTTACCCCCTTTTAATTTGTCCTTGCTTATGCCTGCC
TCTTTCCGCTTGGCAGGGATGATGCTGTCATTAGTATTTCACCAAGNAAGTAGCCTTTCANGAGGG
GTAACCTTAACAGGAGTGTCANGATCTATCCTTGTCAATCCCAAACCGTTTTTACATTAAAAATAA
GAGGATCCTTTTAAGTGCACCCCAGTGGACCTGACATTAAGCAGGCATCTTTAAACACAGCCCGTG
TGTTTCAAAATGGTACCCTGCCCGGGGNCGGGCCGCTCTAAGAACTAGTGGGATCCCCCGGGGCCT
GGCAGGGAATTCCGATATTCAAAAGCTTATCGATACCCGNTCGACCCTNGAGGGGGGGGGGCCCG
GGTNCCCAGCTTTTTGGTTCCCCT

| | |
|---|---|
| Sequence 706 | cMhvSG073a09 |

GCTCCACCGCGGTGGCGGCCGCCCGGGCAGGTNCTCCTTGAATACCACTTAGAGTCAGAAAGATA
AGGCAGCAAATCAGAATGGCAGTTTGATTCATGGTGCTGAGACTGGAGGTTCCTCTGCTGTAGGCT
CAGAATATGTCTAAGCAATTGAGGAATGTCTCCCCCGCGTACCT

| | |
|---|---|
| Sequence 707 | cMhvSG073a09 |

TAAGTTGAAGGGGTTAAATTNGCGCCGCCTTGGGCGTAAATCATGGGTCATTAGNCTNGTTTCCCT
GTGTGGAAATTGTTTATCCCGCTCAACCAATTTCCACCNCAAACCATTANCNGAANCCCCGGGGAA
GCCAATAAAAAGTTGTTAAAAGGCCCTTGNGGGGNTTGCCCCTAAAATTGGAAGGTGGAGCCTTA
AACCTTNAACAATTTANAATTTTGGCGGTTTTGGCGGCCNTCCACNTTGGCCCCCGCTTTTTTCCAA
NGTCCGG

| | |
|---|---|
| Sequence 708 | cMhvSG074a12 |

AGGTACCACGATGTATAGAGCAACACTGGGGTAAGGTCACTGTGGGATGGTTGCCTGCTGAGACC
TGTGCAAACGTAACACATGCCACCATGCCAAGGATGTGGCGGAACAAGCAGCCCTACCAAGGCTG
GGCCCCCATGGACTTTGTGCCTGCTGGGAGTTTATAGGTCTGTGGGGACATAGGATGGCCATATCT
GCCAGCCAACTAGACTGGACATTGT

| | |
|---|---|
| Sequence 709 | cMhvSG074e03 |

TTAGCTCCACCGCGGTGGCGGTCGCCNNGGGCANGTACCTACNGNGTGGCGCTGGGGTNTGGCTC
CATGACCATANATCTATTGGGGGACGTCAGAGAAACGGCGTCATGCCCAGCCACTTCAGCCGAGG
CTCCAAGAGTGTGGCCCGCCGGGTCCTNCAAGCCCTGNAGGGGCTGAAAATGGTGGAAAAGGACC
AAGATGGCGGCCGCTCTANAACTAGGNGGATCCCCCCGGGCTGCCAGGAATTCGATATCAAAGCT
TATCGATACCCGTTCGACCTCTGAGGGGGGGGGCCCCGGTACCCCANNCTTTTTTGTTCCCTTNTA
AATTGAGAGGTTAAATTTGCNGCCGCTTTGGNCGTTAAATCAATGGGTCCATAAGCCTTGNTTTCC
CTTGGTGTTGGAAAAATTTGTTTTAATTCCCGCTTCACCAAAATTTTCCCAACNACCAAACCAATTT
ACCNGAAGGCNCCGGGGGAAG

| | |
|---|---|
| Sequence 710 | cMhvSG001f04 |

CCGGGCAGGTACGCGGGGAGAGAGGTTGAGAACAACCCAGAAACCTTCACCTCTCATGCTGAAGC
TCACACCCTTGCCCTCCAAGATGAAGGTTTCTGCAGCGCTTCTGTGCCTGCTGCTCATGGTAGCCAC
TTTCAGCCCTCAGGGACTTGCTCAGCCAGATTCAAGTTTCCATTCCAATCACCTGCTGCTTTAACGC
GATCAATAGGAAAATTCCTATCCAGAGGCTGGAGAGCTACACAAGAATCACCAACATCCAATGTC
CCAAGGAAGCTGTGATCTTCAAGACCCAACGGGGCAAGGGAGGNCTGTGCTGACCCCAAGGAGA
GATGGGTCANGGATTCCATGAAGCATCTGGACCAAAATNTTTCAAAATCTGAAGCCCATGAGCCTT
TATTACATGGGACCTGAGAGTCAAAAGCTTGGAAGAAAAGGCTTATTTTATTTTTCCCCAACCTCC
CCCCAAGGGGCCAGNGGGGACCATTTANTTTTANTTATTAACCATNCNCCAAAAGAGAATTATTTT
TTTAAAATTAATTTTAAAAAGCATTAAATTTTTTTTTTTTAAAAAAGGGGTTTTTAAATTATTATTTT
TAAAGNTGGNTGGANGGGTTTTNAACTNTTATTTTTNGCAAACNATTNCTAAAGGGGNAATGGTN
AAAAANGGCAAAAAATNCCNGGGGGGGAGGGGGNTTTTTGGGTTTTN

| | |
|---|---|
| Sequence 711 | cMhvSG002f11 |

CGAGGTACGCGGGGACATTTTCTCGGCCCTGCCAGCCCCCAGGAGGAAGGTGGGTCTGAATCTAG
CACCACGACGGAACTAGAGACAGCCATGGGCATGATCATAGACGTCTTTTCCCGATATTCGGGCA
GCGAGGGCAGCACGCAGACCCTGACCAAGGGGGAGCTCAAGGTGCTTATGGAGAAAGAGCTACC
AGGCTTNCTGCANAGTGGAAAANACAAGGGATGCCCGNGGGATAAAATTGCTCAAGGGACCTTGG
ACGCCAATTGGGAGAATGCCCCAAGTGGGACTTTTANTNGANGTTCATTCGTGGTTNGNGGGCTTG
CAAATTNACGTTTTGGCCTTGTTNNCNAAAGGTACCCTTGCCCCCGGGCCNGGGCCGGTTTTTAAN
AAACTAAGGTGGGAATNCCCCCCGGGGCTTTNGCAGGGAAATTTTCGANNNTTNNAAAGCCTTTA
TTNGAANTACCCCNGCCCNAACCTTTNAAGGGGGGGGGGG

| | |
|---|---|
| Sequence 712 | cMhvSG002h09 |

AGGTACGCGGGATTGAGAGCTCTGCTATGCCACTGTTGAATTTTTCCCAAGATTCCTGTCCCTAGC
CCTCACTTCAAACTCTGCTTCCTTGGACAGATTTGGCAATAGCTTTGTAAGTGATGTGGACATAATT
GCCTACAATAATGAAAACCTACAGGAATTTTTTTATTTTTCATTTTCCCCTTAGGCATATTTAGTAT
TTTTCCCCCAGGCAGATCATTCTGAGTGTGCGAGTGTGTGTGCACATGTTACAAAGGCAACTACCA
TGTTAATAAAATATTCAATTTTGNNCTANGNAAAANTATGANGAAAAGGGTANCTGCCCGGGGCG
GCCCGGTTNTAAGAAACTAGTGGATCCCCCCCGGGCTTGCAAGGGAAATTCCGAATATTTAAGNTT
AATCCGAATANCCGGGCGNACCCTTNNAGGGGGGGGGGGCCC

| | |
|---|---|
| Sequence 713 | cMhvSG003a01 |

AAATTGGAGCCTCCACCCGCGGTGGCAGGCCCGAGGTACCNTTTTTTTTTTTTTTTTTTTTTTGATTN
GCAACAGGCAANAAGTTTATCGACNCACTAATGATTAANCAAGGAAAACNCATTTTACAATTNAA
AGACAAAACCGAACCAATANGACAAAAGAATCTGATAAAGGATTACAGGAGTAGCTGCAGCTNT
NTGGCCNCANGTTTNTTAGCAGTAGCTTCANCACNCCTTTTGTTAAGGNTGTCATACATNTATACA
TNCTGGGGGACCAGNGACTCAAGCNTGCCTGCATTTTACNTCTTTGAAATTTTTACATTCNNANAA
CCAGCCGNTTNGNNNACNNAAAAGTTTGGGNNGGTACATTTANTNCCNAACACACANGGCCCTGG
GGTTCCNNCCTGCGTTTTTATTGGCGAAATTTTTTAAA

| | |
|---|---|
| Sequence 714 | cMhvSG003a08 |

GAAAGGGTATGTTAAATAGTTCAGCCAGTAGCTCACCACAGGGATTAAGGGCATCTGCCAGAATG
ACATCAAACTTTGACTCTTGTAGTTTCATCATAAGTTTCTTATTCAAAACTGCATCTTTACAGAGCT
TGTTACTGTAGTCATAATATTCCCAACACAATTCTTGTAATTGTGAAAAATATGACCAAAATGTAT
TTTTTGAAACACCATATATCCATCTATCGAGAATTTTCAGAAGAGAATCTTCCAAATCATTTTTAGT
TAAAGATGTAGGATAAACTTCTAATTTAATAGCAGATGATTTACTGGCATTGACAAGAGTAGAAG
CCGAAGATGTCAACACAGTCACCTCATGGACCCCTCTGGACAAGCTCTTCCCAGGGATTGGTCTTC
ATATTTATCCCAATGGCTGGTATTCTGGNGGGCCCCCACTTAGCACCTTTTCANCAAGCTTTCCCAG
AGCTTAAAGTTAACCAACCTGGAGCTCCCGCGGTACCTGCCCCGGGCNGGCCGCTTCTAAGAACCT
AGGNGGATCCCCCCCGGGCCTGCANGGAANTTCCGATTNTCAAAGNCTTATTCGATTNCCGTCCGA
CCCTCCGAANGGGGGGGGGNCCC

| | |
|---|---|
| Sequence 715 | cMhvSG004h03 |

GGCTCCCATCCTCCGGAATCTGCAAAATGGCTNCTTCTTNANAAATAATGGGGAGAGGGATGGCTT
TNAGGCCAGAGATCAAGGCCCTCGAGTATTAACTTGAGCATTTGGGCACAAAATAGACACTTTTG
GATTTTCCCGTCTTTTCCAACACCAAGGATGAGATTATCAAAAGATGTGTTAAATTAATTTGTACCT
CGGCCGCTCTAGAACTAGCTGGATCCCCCGGAN

| | |
|---|---|
| Sequence 716 | cMhvSG004h03 |

CGATAACCGTCGACCCTCGAGNGGNGGGGGCCCNNGNTACCCCAGCTTTTTGTTTCCCTTTTAAGT
GGAGGGGTTAAATNTGGCGCGCTTTGGGCCGTAAATCATGGGGCATAAGCCTGGTTTTCCTGTTGT
GGAAAATNTGTGTNTTCACGCTCACAANTTTCCACNCNACATACCGANCCCGGGAANCCATTAAA
NNTGTAAAAGCCTGGGGG

| | |
|---|---|
| Sequence 717 | cMhvSG005h10 |

GCGGNGGCGGCCGAGGTACTCTCCAAGCTGCTCAAAAAGCTCACAATTTTGTTTGATTAAATTCTG
AGGCTCTTCCACAAGAGGTTTAAATTCATCGAACACTTTGGCATAGCATTCATGAGGATCTGCAGC
GGCACAGCACTTCTCTAGAGTGGTTNCATATGTCTNGGCAAGTCTCAGCAGCAGCACGACAGAGT
AATCAGGATGCCTTCTTGCATATTCATACAAAAACATGCCCAGGAAGACATCCTTTGCCTCANCAT
AGTTTTTGCAAACATCCTTACTTTCAACAAAATCANCAGCTAATGAAGGCAAGTCANCAGGCATCT
CATCATTTTCCACTTCGGCAATGCAGTGGGATTTTTCCAACAGAGGTTTTTCACAGCATTCCTTCAG
TTTTACTGGAGATCGAATCTTGATTTTCACAGATATACTTGGNAAGGTCCGCCTATAAGTAAGTTG
GTGGAAATTGTTNAACACCTAATTGACATTTGCTACACTTTCTCCTTTAGACCTTTTATTTAAGTTG
GGCGGGAACATATTCCTTTTGTTTTCCCCCANATTACCTGGCCNCGGGGCCGGGGCGCTTCTAAAA
AACTAGNTGGGGATCCCCCCCGGGCCTGCAGNGGAATTTCNAATNNTCAAAAGCGTTTATTCGATT
CCCGGCCGACCNTCCCANGGGGGGG

| | |
|---|---|
| Sequence 718 | cMhvSG009d03 |

AGGTACGCGGGGGACATTTTCTCGGCCCTGCCAGCCCCCAGGAGGAAGGTGGGTCTGAATCTAGC
ACCATGACGGAACTAGAGACAGCCATGGGCATGATCATAGACGTCTTTTCCCGATATTCGGGCAG
CGAGGGCAGCACGCAGACCCTGACCAAGGGGGAGCTCAAGGTGCTGATGGAGAAGGAGCTACCA
GGCTTCCTGCAGAGTGGAAAAGACAAGGATGCCGTGGGATAAATTGCTCAAGGACCTGGACCGCC
AATGGAGATGCCCAGGTTGGACTTCAGTGAAGTTCATTCGTGTTCGTGGCTTGCAAATCACCGTNT
GCCCTGTCACAAAGTACCCTGGCCCGGGCGGGNCCGCTTCTTANAACCTAGTTGGGAATCCCCCCC
GGGGNCTGCAAGGGAAATTTCGAANTANTCAAAGCCTTTATTCGAATACCCGTTCGAACCCTTTTG
AAGGGGGGGGGGCCCC

| | |
|---|---|
| Sequence 719 | cMhvSG009h03 |

GGCGAATTGGAGCTCCCCGCGGTGGCGGCCGAGGTACACGGGGGTGGCTGCATGCCAGCCAGACA
CCCAGTCTTGCAAGACTGTCATTGAAAATCTCCGTTTTGCTGTTCTCCGGGTCTCTGCGTCCAGTCT
TTGTGTTTGGACGGACCTGCCGGGCCATCTTTCTGCAAGAAGATAAAGGAAGACCAGGAGTGCCT
GCCGAACTCCTATGGAGGAAGTCTAGGAGAGGAAGGGGACAGGGAGGAAGATGGTGTCTGCAAA
CCAGGAAGCAGCCTTGCCAGACACAGGATTGGCCACAACCTTGACCCCAGACTTCCAGCCTCCAG
AACTGTGAGAAATAAATGTCCATATTGACTAGGGGCACAGGGCATGGGGGAACTGGTTCCAGACC
TGCCTCCTGGGGAAGTTTGGGAGGGGGGCATTTCAACCTGTTAATTTCTCAAATTATGTAGTCATT
CCAAAAAGAAATAGAAACCACCTTCATTTNACTTTGTGATTNGCCAAAATTATTTGGATCAAATTT
CTTCATAAGAAAAGGTTATAACCATTTTTCCCCCTTTTTTGGGTACCCTGCCCCGGGGCGGGGCCG
CTTTTTAGNAAACTAAGTGGGATTCCCCCCCGGGGCTGNGANGGAATTTCCGATTATTCNAAGCCT
TAATCTGATTACCCGNTCCNACCCCTCGANGGGGGGGGGCCC

| | |
|---|---|
| Sequence 720 | cMhvSG010a08 |

CCGCGGTGGCGGCCGCCCGGGCAGGTACTTTTTTTTTTTTTTTTTTTTTTGGTTTAAAATTTCTGGCA
GGTAGAGCAGGTGCCCTCCCCCAGACACTTGCAAAAATGTAGAGAGAGGTGGAGGGCTGGGGTGC
CTGCGAGCAGGTCCCAGTTGCAAGAATTAAAGCCTTGCAACAGGTTGGGGGAAGCAGGGCAGCGC
CAGGTGCACGCAGTGAGCGGAGGCCGGAGAAACCCTCAAGCCTGAGCGGGTCAGAATTATAGGG
GAAAAAAAGCCACAAAATTGTTCACCCCCAAGCAACCACCGAAATAATGAGATCGGATGCAGTGG
AGATGGCGTTGGGGGTGGGAGAGAAAAATGGATTTATCTTTAAAATTTTTGCTTAAAATCTAAAAT
ACACCCCCGCTTTTTAACCCTCAACTTCCAGCGGTGCGCGGCGCCGCANAACAGGTAAGAGGCGTT
NGCTTGCAGCCCNAGAGGGTGGGAGAAAATGTTGAAATTCAAGAATTTNAAAAACNAAAAACCA
AAAACCCAAANNAACCCCCAAACCCNTTAAACACCTTTTTTTTTTCCACTTTTGGCCACCTTCTTTT
TNCGAAAATTNTCAGGTTNTNCGCCAAAANTTCCGGGAAAAAGGGGNGAAAAAACNGGAGGGNG
GGGTTNTTNAAAAAGGGNGCCAAAAAAAAGGGG

| | |
|---|---|
| Sequence 721 | cMhvSG010f10 |

CCGGGCAGGTACCAACAGCCCCTTCCCTCCCAAGTTAGGTGAGCCCTTGGGCCAGTGTATGGGCAG
AAAAGCAGATTTGTGTCCTTCAAAAGGGAAATGTAAAAAAGGTGAAAGCTCTAGTTGAAGGGCAG
TGAGAGGGGCTGGAGTGGGAGAGAAGGTCTCTCCTGGCCGGTGGTCTGGGTGCAGCAAGGGCACT
CTGAGAAGGCAGAATGGAAACGCAGGGCTGGAGGGGCCATGGGCACAGGTTTGGGGGCTCCTTCC
AGCCTCTACTATGTTGCCCCCTTCCCCAAAGCCCTTACAGGGGCCANAAGCCACATTCCCCCGTNG
ACCCTGAGTCTTGGCCTCATTTTGGNGAAAGTCCTTCTGGGGGTGTATTGGGATGCCTGTGTGTTGT
TGAGTGGAAGATGGGTTGGGGGGGGCCAACGGGCTTATCTTGGGCTTCTTAGCACACTTCNATGN
GGGAANAACCCAAGCCTCTTTGGGGAAACAAACAAGGGATTGGGGGGGTGCCTTGGGGGAATNG
GGGGGTT

| | |
|---|---|
| Sequence 722 | cMhvSG012b06 |

GGAATTCAAAATTAACATNCTTGTCCGNGNGCTTNTTNTANACNCCAAAAAAAGTTTCAACCTTGN
GTTCCNCATTGNTCNGCTGNGCTTTNNCCAAAAGAACCTTTNTNAGCCGGTTGCCACCATCAGGAG
GAAAGANCNNAAGGGGNTTTATTTTTTTGCNNAGGNGGTCCATTNNNTTTTAAAAAGNCCCCGNG
GGACCTTGGNCNGCTTTAAAANTANGGGATCCCCCNGGCTGGAGGAANTNTNANANTNAAANCTT
ANTTGGATNCCCGTCGAACCTTTNGGGGGGGG

| | |
|---|---|
| Sequence 723 | cMhvSG012d06 |

TCAGTCCTTCCTTTTATAAGGACAATAATTGGAGTAGTTTAATCTTATTCATGTGCAGATAAAAGA
GGTTTATGAAGTTTAGGGTGAAGTAGGCAAGGGAATCTGTTTACTCCCTCTTCCCTCTACTGAATA
ATTTTCCCTCTACTGAATAATTTTCCCTCTAAGAATTGCTGTGGGTAATACCAGGAGTGGGGACATT
GCCCACATGCATAAGAGCGTATCTCTCCATTCGATCAGTTTGTCACCATCTTTGCTCTGTTTTGAAA
GTCAGGCTTNTCTGTGACTGTGAAGCCCTGCTGTTCCCTGAAAATCTGATAAATGGAGCAGCNGGA
GGGTNTTTTTCTTTCTGGGCTCTNGTANAANCTCATNTGGTGTTGCAACTTTGGTAATTTTCCCAAN
AGTTTGAAAAAGGGAAAGAATTGGAANCTGGGAATAATTGGTGTNAAACCTATTCTTGGCCTTAA
CATTNAGTGGTAGCCATTTTTTGCAAATTT

| | |
|---|---|
| Sequence 724 | cMhvSG012f07 |

GCATGGAGGAATCCACACCATGATCCAATCACCTGCCACTGGGTCCNTCCCTGGACACATGGGGA
TTATGGGGATTATAATTCAAGATGAGAGGAGATTTGGGAAGACCCNCTACATTATTTTGAGACAAT
GGGGAAGCTNAAATGTGCTNANTCGAACCTATTGGGATTTTNAATTTCTCGCCCATTCTTACCAAA
TGTTGATTTTGNTGGGAGGACTTCACTTGTAAACCAGCCAAACCCCTTGCCTAAGGGAAATGGGAA
GAGTTTTGTGCCATAAGCTTCTGGAGAAAAANTGGNAATTGGTGGGTGTTTTTCTCTGGGGGTCCG
ATTGATTCCAGGTAACCATTGTNCAGAANAGAAAAGNTGCCCAAACATGGATTTTGCAATCAAGC
CCCTTTGCCCCAAAAAATNCCCCCCAAAAAAAGGGTTTCTANTTGGGAAGAATTTTGAATGGGCCA
ANGAAAAGNCCCANAATANCTTTTNANGGTTTNCCAATNACTTCGGACTTGTNACCCTTGCCCCGG
GGCGGGGNCGGCTTTTTAGAAACCTAAGTNGGGAATNCCCCCCGGGCCTTGGCANGGAAATTTNC
AATATTNAANGCCTTTTTTNGGATACCCGTCNGACCCTNNAAGGGGGGGG

| | |
|---|---|
| Sequence 725 | cMhvSG012h06 |

GAATTGGAGCTCCACCCGCGGTGGCGGCCGCCCGGGCAGGTACACAGGATTGGGTCTAGACCTTG
ATGCCTGGGTGGAGGGCCCTTGTAAGGGGCCATAGCCTCTTCAGGACCAACTGGAGGGAGAGTTA
GGAAACACCAGCTCCTGCCTGGGGCAGTGAGGGAATGGGAGCAGCTGTGGGCGCCTNATTTNAGG
CAAGTCCTNCCCAAACCTTCAGATGCAGTGAGACCTGGCCTTCCTGTTGTGCTTTTCAGACTTTGTT
TTCAGAATGCTTTTATCTCGAGTGTGCCCTTCGGCCCTCACAAGAGCCCCTGGGGAGTANGTGGTG
GCCTGTGCCGTCATCCCCATTTCAAAGCAGGGAGCTGAGGTCCTGGGAGGGGAAAGTGCTTGCCT
GAGGTCCCACTGTGTTAGTTGGGTGGGCAGGACTNGAACTNGGTTCTTCAACAAGCCCAGAAGCT
NAANTNTTTTAACACCCC

| | |
|---|---|
| Sequence 726 | cMhvSG014d08 |

ACCCCAAGTGTCANCTCCAACTCTTGTNGNGGTCTAANGAAACCTAGGAAAAGTGGNCATCTTNT
GTTGTAAACATCCTGAAGCAAAAAGAATGCCCTGTGCANGAAGACTATCTATCCGTGGTCCTGAA
CCAGTTATGTGTGTTGCATGAGAAAACGCCAGTAANGTTGACAGAGTCACCAAATGCTGCACAGA
ATCCTTGGTGAACAGGCGACCATGCTTTTCAAGCTCTGGAAGTTCGATGAAACATTACGTTCCCAA
AGAGTTTAATGCTGAAACATTTCACCCTTTCCATGCCAGATATATTGCNCCCTTTTTGNAGAAGGG
AGAGNACAAAATCAANGAAAACAAACCTGCACTTTGGTTTGGAGCCTNCGTGAAAACACCAAANG
CCCCNAGGGCAACCAAAAAGGAGCCAACCTTGGAAAGCCTTGTTAATGGGATTGGATTTCCGCCA
GCTTTTTTGTTANAAGAAAGTTGCTTGCTAAAGGCTTGGACCGATTAAGGGAGAACCCTGCTTTTG
GCCCCGAGGGAGGGGTTAAAAAAAAA

| | |
|---|---|
| Sequence 727 | cMhvSG014g05 |

TTGGAGCTCCCCGCGGTGGCGGCCGGCACCTTGGCCGCNTTCAGAGTGCCNATGAGCTCCNNCNG
ANANGGNTTCCGCCNNAACAANNNACNTTTTNCCCCAACGAAGAACTTCCTGGAGGGCGCCATGG
CGCTGGAGCCNAGGTGCTTAAGGTCAGTGTCTCCCGCGTACCTCGGCCGCTCTAGAACTAAGTGGA
TCCCCCGGGCTGCAANGAATTCCATATCAA

| | |
|---|---|
| Sequence 728 | cMhvSG014g05 |

TTAGTGAGGGTTTAATTGCGCCGCCTTGGGCGTTAATNNATGGTTCAATAAGGCTGTTTTTCCCCTG
GTTGTGAAAAATTTGTTTANTTNCCNCTTCCACAATTTTTCCACAACCAAACCANTACCGANGCCC
CCGGGGAAGCCATAAAAAANNTNGTTAAAAAANCCC

| | |
|---|---|
| Sequence 729 | cMhvSG015b06 |

ACCCNGCTCCACCGTGGTGGNTGCCNCCCGGGCAGGTACACTGGTGATTTCTCAAGACAAGAAGA
TAGGCACTTAATGGCAACNTGAAATTCCTAATATTAAGCCTGATATTCTTATCATTGAATCTACTTA
TGGGACCCATATCCATGAGAAACGTGAAGAGCGAGAAGCAAGATTCTGTAACACTGTCCACGATA
TTGTAAACAGAGGAGGCAGGGGTCTCATTCCTGTCTTTGCTCTTGGAANGGCTCAGGAGCTGCTCT
TGATTCTAGTATGAAGTTACCTCGGCCGCTTCTA

| | |
|---|---|
| Sequence 730 | cMhvSG015b06 |

GAATTCCGATATCAGAGCTTTATNGATACCCNNCAGNCCCTCGNAGGGGGGGGGCCCCGGGTTCC
CCAGCCTTTTTGTTCCCTTTAGGTTGAGGGGTTTAATTGCCGCGNCTTGGGCGTAATCATGGTTCAA
TAAGCCTGGTTCTNCCTGGTGGTGAAAATTTTGNTTAATTCCCGNCTTCACANATTTTCCCACCACC
ANACCANTTACCNANNCCCGGGGGAAGCCANTNNAAANGTGGTANAAAGCCCCTGGGGGGGT

| | |
|---|---|
| Sequence 731 | cMhvSG015b12 |

AGGACGCGGGGGCATTGCCGAAGTGGAAAATGATGAGATGCCTGCTGACTTGCCTTCATTAGCTG
CTGATTTTGTTGAAAGTAAGGATGTTTGCAAAAACTATGCTGAGGCAAAGGATGTCTTCCTGGGCA
TGTTTTTGTATGAATATGCAAGAAGGCATCCTGATTACTCTGTCGTGCTGCTGCTGAGACTTGCCAA
GACATATGAAACCACTCTAGAGAAGTGCTGTGCCGCTGCAGATCCTCATGAATGCTATGCCAAAGT
GTTCGATGAATTTAAACCTCTTGTGGAAGAGCCTCAGAATTTAATCAAACAAAATTGTGAGCTTTT
TGAGCAGCTTGGAGAGTACCTGCCCG

| | |
|---|---|
| Sequence 732 | cMhvSG015b12 |

AGCTGTTTCCTGTGTGAAAATTGGTTATCCGGCTCACAATTTCCACACAACATTNCCGAANCCGGG
GAGGCATTAAAGNGNTAAAAAGCCCTGGG

| | |
|---|---|
| Sequence 733 | cMhvSG015h02 |

CGAAAACTGATCAGACTGTCTCAGATCAAGGAAAAGATGGCCAGAGAGAAGCTGGAAGAAATAG
ATTGGGTGACATTTGGGGTTATATTGAAGAAGGTTACGCCACAGAGTGTGAATAGTGGAAAAACC
TTCAGCATATGGAAACTGAATGATCTTCGTGACCTGACACAATGTGTGTCCTTGTTCTTATTTGGAG
AAGTTCACAAAGCGCTCTGGAAGACGGAGCAGGGGACTGTCCGTAGGGATCCTCAATGCCAACCC
CATGAAGCCCAAGGATGGTTCAAAGGAGGTGTGTTTATCTATCCGATCATCCTCANAAGGTCTTAA
TTATGGGTGAAGCTCTTGACCTGGGAACCTGTANAGCCAAAGAAGAAGAATGGAGAGCCGNGCAC
CCAGACTGTGAATTTGCGTGACTGTGAGTACCTCGGC

| | |
|---|---|
| Sequence 734 | cMhvSG015h02 |

AGGAAATTCGATATCAAGCTTTATCGATACCCGTCGANCTNGAGGGGG

| | |
|---|---|
| Sequence 735 | cMhvSG027b09 |

CCACCGCGGTGGCGGCCGCCCGGGCNGGTACNCGGGGGGCACCANCACTTGGAGATTTTTCCGGA
GGGGAGAGGATTTTCTAAGGGCACAGAGAATCCATTTTCTACACATTAACTTGAGCTGCTGGAGG
GACACTGCTGGCAAACGGAGACCTATTTTTGTACCT

| | |
|---|---|
| Sequence 736 | cMhvSG027b09 |

ACCCAGCTTNTTGTTCCCTTTTAAGNGGANGGTTAAATTGCGCGCCTTGGCGTAATCATTGNGTCA
TTAGCTGNATTCCCTGNNGTTGAAAANTTGTTTATCCCGCTCACCAATTTCCACAACAAACAATAC
CNAGCCCGGGG

| | |
|---|---|
| Sequence 737 | cMhvSG027g03 |

GATTGAGCCCTGGCAGGCATATGCATGCAGCACTGCCTACACAGTCCTGAGTCANAAACTTCTCAT
GGGGTCTCTGAGTCTGGAATGTCTGAGTTCTCAGGAGGGGTAGCATTTGCTGCTAACCCTCTGCCT
CCTTAGCTTGAGCTGTCTNTCGNGGTTTTTTCCCCTGATGGATGTTAACATCTTCCCAACAGAGCTN
TCAACCCAGTGAGGGAGGAGTCTGTGTANATCNCCTCCCATCATTCTCCATANAGTCTNTNTGGCC
CAGGTTAGAANAAAAAGACTTCTTGGCTCANACTCCAAAGACTANAGTCAGGGACAGTTTCCTTA
GNGGTGTAAAATGGCAAGAGTAGCNCTAATCTCACAGAANACTCCTGCANAACACACTGGCACAT
TTCAACCATNAAGCTGNTCTCAACAGTGTGAAGCCTGGGCAAGCACTTCCCCCTTTTAATGGTTNG
ACCTTTNGAAAAAATCTNNATNTGNNNGAGCCCAACCAGGGGAAAGACCCTTNTTGCATTTCATT
NCCCTGGACTCCTTTCAANAAAGCNANGGGCNAAAACCCTTTTTTTT

| | |
|---|---|
| Sequence 738 | cMhvSG027g12 |

GGGCGAATTGGAGCTCCCCGCGGTGGCGGCCGCCCGGGCAGGTACATTGCAGATCCCAACATTGC
TAAGCTTGTTCACTTTCAGGGTTATCCATGTGAACTTTTGCCTCTGACGGTCGCAGGTATTCCATCT
ATGCACATCTGTCTAGATTTCATACCTGAGCTTATTGCACAGCCAGAACTTGAGAAACAGATATTT
GCTATCCAGTTGCTTTCTCACTTGTGTATACAATATGCATTACCAAAGTCACTTAGTGTGGCTCGTT
TAGCTGNCAATGTCATGGGAACTTTGTTAACAGTTTNAACACAGGCTAAGCGGTATGCTTTTTTTA
TGCCAACTCTGCCAAGTTTGGTCTNTTTTTGTCGAGCATTTCCTCCATTGNATGAGGATATTATGTC
TTTGCTGATCCAAAAAGGGCAAGTTTGTGCCTCTGATGTTGCCACTCAGACAAGAGACATTGNTCC
AATTATTACACGNTNTTCNACAAATANAAGGAGAAACCAAGTGGGATGGNCTCAAAATCTGGTAA
AGATTCANTCTTTATAAAAATGGANNCAAGGGACCCCTGGAAGCATGGGANTCCCTGAATGNACC
CTCGGGCCGGNTCTANNAACTAAGGGGGAGCCCCCCNGGCTTGCAAGGAAATTCCGNTANTCAAA
GCTTNNTCCANTANCCGTGGGNACCTTNGGAGGGGGG

| | |
|---|---|
| Sequence 739 | cMhvSG028b10 |

CCGGGCAGGTNCGCGGGGGCATTGCCGAAGTGGAAAATGATGAGATGCCTGCTGACTTGCCTTCA
TTAGCTGCTGATTTTGTTGAAAGTAAGGATGTTTGCAAAAACTATGCTGAGGCAAAGGATGTCTTC
CTGGGCATGTTTTTGTATGAATATGCAAGAAGGCATCCTGATTACTCTGTCGTGCTGCTGCTGAGA
CTTGCCAAGACATATGAAACCACTCTAGAGAAGTGCTGTGCCGCTGCAGATCCTCATGAATGCTAT
GCCAAAGTGTTCGATGAATTTAAACCTCTTGTGGAAGAGCCTCAGAATTTAATCAAACAAAAATTG
TGAGCTTTTTGAGCCAGCTTTGGAGAGTACCTNGGCGCTCTAGAACTA

| | |
|---|---|
| Sequence 740 | cMhvSG028b10 |

GCCCGGTACCCAAGCTTTTGTTCCCTTTAGTGGAGGGTTAATTTGCCGCCGCCTTNGGCGTAAATTC
ATGGGTCATTAGCTGGTTTTCCCTGTGGTGGAAAATTTGGTTTATTCCCGCTTCACCAATTTCCCAC
CACCAACCANTACCGGAAGCCCCGGGGAAGCCATTAAAAGTTNGTAAAAAGCCCTNGGGGGTGGC
CCTAAATGGAGGTGGAGCCTTAACCTCACAATTTTNAATTGGCGGTTTGCCGCCTCACCTTGGCCC
CGCCTTTTCCCAAGTCCGGGAAAACCCTGGTCCGNNGCCCAAGCCTGCAATTTAATTGGAAATTCG
GGNCCAACCCCCC

| | |
|---|---|
| Sequence 741 | cMhvSG029c10 |

GAAGTGGCGCCTCTGAGAAAAGAAGGTTGGAATTATCGTAATTTGTTTCTAGGCTGAGATACCAGC
ATGGAGAAAATGTTGGAGTGTGCATTCATAGTCTTGTGGCTTCAGCTTGGCTGGTTGAGTGGAGAA
GACCAGGTGACGCAGAGTCCCGAGGCCCTGAGACTCCAGGAGGGAGAGAGTAGCAGTCTCAACTG
CAGTTACACAGTCAGCGGTTTAAGAGGGCTGTTCTGGTATAGGCAAGATCCTGGGAAAGGCCCTG
AATTCCTCTTCACCCTGTATTCAGCTGGGGAAGAAAAGGAGAAAGAAAGGCTAAAAGCCACATTA
ACAAAGAAGGAAAGCTTTNTGCACATCACAGCCCCTAAACCTGAAGACTCAGCCACTTATCTCTGT
GCTGTGCTAGGAAACAATGCCAGACTCATGTTTGGAGATGGAACTCAGCTGGTGGGTGAAGCCCA
ATATCCAGAAGCCTGACCCTTGCCGTGTACCTTGCCCCGGGGCGGGNCGCTCTAGGAACTNGTGGG
ATCCCCCCNGGCTTGCAGGGAATTTCNAATATTCAAAGCCTTATTCCGATNACCCGTCGACCCTNC
GAGGG

| | |
|---|---|
| Sequence 742 | cMhvSG038b09 |

CCNGGCANGTACCTGCACGCCTGCNACACCNACCTCTNTCTGGGCNTNTATTACAACCNAANATN
ATNTGGNTNTGNAAGGCGCNAGCCACTTNTTCCNNNAATTGNCCGATGANAANCCCNNGGGCTAC
NAGCGNNTCCTGAANATGCAAAACCAGC

| | |
|---|---|
| Sequence 743 | cMhvSG038b09 |

GCCATTAGCTTGAATTCCTNGNGACGACAATTGGGTAATAGCGGCTCAACAGATTTTCCTACACGA
ACCATTACTNAGCCCTTGGGCNGCNATAAAAAGTTNGTCTANAGCCTNTTGGGGTGTTGGCCCTAN
ATCGGAGNTTGGAAGCCTAAAACTCCAGCAATTTAAAATTT

| | |
|---|---|
| Sequence 744 | cMhvSG038f03 |

CGCCGGTGGCCGGCCCCNGGTACNCTGGNTGCNNCCTACTANTNGCCATATTGGCCCGTGGGGNG
GNGGGGGGGGGACTCAAAAAANAAAANAANTNTTTTTTTTNNTTCCCTGNANGACCACTGGNAAG
GTCAAGCTCAGAATCTATTACTNANAGAATTTTTCCCTGCNCATNTATGGTNTCCCCANCNACTCN
ANNGATTNACTAATTAATGTAACTTTGTTNAAAAAAA

| | |
|---|---|
| Sequence 745 | cMhvSG039d11 |

TTGAAAGAGGAAAATCTGTGGCCAAATTCAAGGCACCCTAGGCTGTGATCCTNGNACTGAACATC
TNGATGAGTCAATACAGGGCACGGAGTAGGACTTTGAAGTCCTCCATTGGATCTTCTCGGANGATG
ANGGAAATGAGAGAGTGTGGAGA

| | |
|---|---|
| Sequence 746 | cMhvSG040c02 |

TGCATAGACTAGTCAGCTTCTGGGGTGACTAGAGCAGGGCTGTTGTCTCCTCAAGCTTCAGCCGTG
CGTGGACTGGTCAGCTTCCGGAGTGACCAGAGCAGGGCTGTTGTCATCTCACTGGCACCTTGGTTC
CATCGTAGGATCAGCTGGGTTGCATGGTCTAGGTCCTGTTGGCTGGTCCACTTGTCCTGGGCTGCT
GGTTTCAGCTGACTGGATGGATGGATCCAAGGCACAATTCCTGCAACATTTCTAGGCTTCCAAGTG
GGTCCCTGGCGTCTTANCTGTGGGATCTCCCAATACCTGCAGGTAAACGAAGGCCCACANGAAGC
CTGGGCCCTCTAGGGAGCCAGGAAAGACACAGTAGCCAGTTGAAAGACTACACCCAAGAAGCCTC
CCGGCTTGCCGCCAGAAGACAAAAGGCCCCGCCCCCCCGCGTTACCTTCGGCCGCTTCTTANAAAC
TAAGTGGGGAATCCCCCCCGGGGCTTCAAGGAAATTTCCGAATANTCAAAAGCCTTATTCCGAATA
CCCCGTCCGACCCTTCGGAAGGGGGGGGGGCCCCCGGTACCCAAACTTTTTT

| | |
|---|---|
| Sequence 747 | cMhvSG041a07 |

TTTTTTTTTTTTTTTTTTTTTTTTTTTTTTTTTTTTTTTTTTTTTTTTTTTTTTTTTTTTTTTTGGGNNNCN
NNCNTTTAAAAANCNNNGGGCNNNAAGGGNTTTNAAGGGTTTAAANCCAANNANCCCATTTTTTT
AANNTTTNNANNCCCNNGGNTTAAAAAAACNNAATTTTTNNAANAATTTTNGGGCAAANNNACNN
CCNTTTTCNAAAAANNGTTTTCCNCCNGGNNNNTTTCCGGGCATTNCTTTTCCTGNTTTTNAAAGG
GCTTNTTNTNNAAAAAAAAAACNTTNCCCCACNATGGATTCNANGGGGNTTAATTCCCCCCCGCTT
NNNGGNNCCTTGGGTNGTCCCCNAAAATNNGNGCCCCCAAAAATCCCNGGGGNNNNTNGGGGGT
GGNTNNNTGGGGGNAAAAATNGTNNTTNTNNNANCCTAAAAATCTTTTTTTTAAAACNTAAAGGG
NCCCCANNTTTCTTCTGGGGANNNAAAAAAAANCCCCCNCNNANNANANNAANNNGGGNTTTTTT
TAAAAANNAAAANANAAGGGCCCCNTNTNTNAAAANNTTGCAAAAAAAAANGNAANNNGGGGG
NGCAAAATTTCCNTTTNTNGGGGGGGGGG

| | |
|---|---|
| Sequence 748 | cMhvSG043d02 |

TCNCCTTTACTTGGAAGGCNNCCCTNGNGNNGGACCCATNCATGATTCAGATCACCAGNAAGGGN
GNCCTNCNCTCNNTTNTGGACATGCATGTCAACGTTGGTGGGAGAAGCTATGTGCCGGGAAAAAT
GAAAGGCAGAAAGGCCAGGAGGNCTGTANNGCCCTNANACATGGCCAAGAAAACTTTCAACCCC
ATCCAANCCATTGTGGACAACATGGAATGTGNAACCAAANTCCAAAACAAANCCATGATTTNNCC
TGCTCCATTGGGNGACCCNACTTGTGCNTTCGGNAACNCTGGNCATANCAGGAACCTCGTGGAAA
TTTNNNCCNCGTCTNTTNNANTNANTGCCCCTGANANNACNGTNGCNATNNNTATCTNCNGNGCN
TTTGCCNCCCNATTCCNTTCGGGNNTNTTCTTATTCCCAAATCCGGGNNAGGGAAGAANTTGGCTT
TCTTTNTNTACCCACTTGNTCCCTGGAGGGCANCCCCCCTTAAGAAAGCTTTANGGGAACGTTNAT
TTCTTTGACNCANGTNGGGNTNNNNANCCCAATGCNTNTTTGAACCCTTTTTNGNTTNNNCNTGTG
GTTNGGGCCC

| | |
|---|---|
| Sequence 749 | cMhvSG045f03 |

AGGTACGCGGGATNGANAGGTTGACCNTGTGATACCGCGGGACAGTTCACATAGACATCAGANAA
TTTATTCCAGAAAGGAGCCTCCTGAATGTGATGAATACGGCAAAGCCTTTAATCACATCTCAGCCC
TTAGCATCGGAAAGCTTATACTGTAAATAAACTTGATGAATATTATATGTGAGGAAAACTTTCATG
TATAGCACTCATTGCTTCANACANAAAATGAATTCCGTCGGTATGTTCCAATCTGTGATGAAATTT
TGAGNAAACATTGCCAAGGAGGGAGCTCAATCTTGNGCCGGGCGCAGTTGGGCTTCACGCCTTGT
AATCNGCAGCCACTTTGGNGAGNGCCCGAGGGCATGGCGGGATCACCGGAGGTCAAGTTTGTTTC
GGAAGGACCCAGCCCTNGGNCCAACAATGGGTGGAAACCCTTGTCTTCTTACTTGTGNANACAAN
GATTNATGTNANAACATTATTTATAANGGGTNCCCTGCCCCGGGGGCCGGGCCCGNTTCTTAAAAA
AACCTTAGGTNGGGAATTCCCCCCCCGGGGGCCTTGGCAAGGGAAATTTCCNAATTTTNTCCAAAG
GCCTTTNTTTCGGAATNCCCCGTTCCGAACCCCTCCNAAGGGGGGGGGGGGNCCCCCGGGTTCCCC
CAAANCTTTTTTTGGGT

| | |
|---|---|
| Sequence 750 | cMhvSG050b10 |

TTTTTTTTTTTTTTTTTTNTTTTTCCCCAACAAAANCNGNTTGNTTTTNTNGCNGGGAACCTGGGAN
GGAATNGGNCANCNGGGGGTNNCCGNAGNANCCCCNTCCCCCGGCNTGACTGCCAANNCCCAGN
TTTGTNTGNAACCCAGNGGNNGGATCANNNTCCNNCCCCNTTNGGNCCATCCNGGGGGNNGGGGG
GACCANNCCCNTNTTTNTNANGGCCANGGGNGNAAACAGTNTTTCCNGTTTTTTTAAGGGTTGCAA
NCAAAGNGCCCATNCTGGGCNAAAATTNAANGCAANCCTTTTTGNGGGGCNGGNNAANGTNATNC
TTAACNCCCCCAAGCTTNTTGGGGNCCCGANAAACAGTTTAAANNNANCNTCCANAGGTNNTNTC
CNNAAAAAACTCNNNCTTNGGCNNAACTGAGGCANCGGCGTTTTTGGCCNCTTTTTTNGCGGNNG
TTTAAAAAAAACNCNTTTTTTTCCCCGGGTACCTTGGGGCNGGTTTTAAAAANTTNGGGGGGATCC
CCCNGGGNNTGGNGGNAATTCNNTTTNAAAGGTTTTTTGGNNCCCCCGCNANCCTGNNGGGGGGG
GGC

| | |
|---|---|
| Sequence 751 | cMhvSG051f01 |

AGGTACAACATTGGTGTCCTAAGACACCTTCAGGTCATCTTTGGTCATTTAGCTGCTTCTCGACTGC
AATACTATGTGCCCAGAGGATTTTGGAAACAGTTCAGGCTTTGGGGTGAGCCTGTTAATCTGCGTG
AACAACACGATGCTTTAAGAATTTTTTAATTCATTGGTGGGATAGTTTAAGATGAAGCCTTTAAAA
GCTTTTAGGGACATCNCAGGCTATGCTAAGGTAAAAGNTCTTANGGANGGTTTCCTTTTGCCTGNA
TCAGNAAGGAATCTTGCNCATAGGGCTTGNCCCCACATTNGGTACCNTGCNCCNGGGGGCCGGGC
CCGCCTCTTAAGAAACCTTAGGTTGGGGATTCCCCCCCCCGGGGCCNGGCCNANGGAAANTTTCN
GGNATTATTCNAAAAGCCTTTAATTCCGGGATTACCCCGNTCCTGAACCCNTTNGGAAGGGGGGG
G

| | |
|---|---|
| Sequence 752 | cMhvSG052a08 |

CCGGGCAGGTACCACCTCAACATTTCCTTGTGCTGAAGCTATACTGAGGACTGTCCTACCTTCACT
ATCAATACTATCCACAGCTGCACCCCAAAACAAAAGTGTATTTACAACTGATGCATGACCCATAGA
CGCTGCTGCTAAGAGGGGTGTACCT

| | |
|---|---|
| Sequence 753 | cMhvSG052a08 |

GTTAAATTGCCGCCGCTTTGGCGTTAAATCATGGGGCATAAGCTGGTTTCCTGTGGTGGAAAAATT
NGTTAATCCCGCTTCAACAAANTTTTCCCACAACAAAACCATTANCGAAGCCCCGGGGAAGGCCA
NTAAAAAGTGGTTAAAAAGCCNCTTGGGGGGGTTGGCCCCTAAATTGGAAGTTGAAAGNCCTAAA
CCTTCAACANTTTAAATTTNGCCGTTTGGGGGCCTTCAACCTGGGCCCGGCTTTTTCCCAAAGTTCG
GGGGGAAA

| | |
|---|---|
| Sequence 754 | cMhvSG052f04 |

TCCACCGCGGTGGCGGCCGCCCGGGCAGGTACGCGGGGGCATTGCCGAAGTGGAAAATGATGAGA
TGCCTGCTGACTTGCCTTCATTAGCTGCTGATTTTGTTGAAAGTAAGGATGTTTGCAAAAACTATGC
TGAGGCAAAGGATGTCTTCCTGGGCATGTTTTTGTATGAATATGCAAGAAGGCATCCTGATTACTC
TGTCGTGCTGCTGCTGAGACTTGCCAAGACATATGAAACCACTCTAGAGAAGTGCTGTGCCGCTGC
AGATCCTCATGAATGCTATGCCAAAGTGTTCCGATGAATTTAAACCTCTTGTGGAAGAGCCTCAAA
ATTTAATCAAACAAAATTGTGAAGCTTTTTTGAGCAGCTTGGGAGNAGTACCTCGGCCCGCTCTAA
GAACCTAGTGGGAATCCNCCCGGGGCCTGCAAGGGAATTTNCGATATCAAAGCTTTATCGAATAC
CCGGTCGACCCTCNAAGGGGGGG

| | |
|---|---|
| Sequence 755 | cMhvSG053g11 |

TTCCAAGGCCCTGNGGGGAAANTTNTTATTAATTCAANTGACAAAATTTGTGTTAAAGTGGCCTTC
TTTTAAGGNACAGACAATAGTNAANACCTTGACTCANGAGGCTGTCTTCCTTGGGGAGACTNTTGG
CANAACATGAGCATTGACCAGAATTTCAAAGGGAAAGGGGCANGGACCGGGGGGCTCTTAAATA
AAAGAAGGGGGAGGGTTNANNTTNGTTTAATTGGNGCCATTNNTNCAGGGAAGGGGTTGAAAGA
ATAACCTTCNCCCCCCAGGGGGGTCCTCCAAGGGAAAGGGGCTTGGGGGGNGCCTTTTGGTTANA
AAAACCTTGANGAATGGTGGCCAANGGAAGAAGAAACCATTCTTTNTTAAAANAAATGGGCCATT
GCCTTTGGGGCTTGGNNCCGCCAANTTGGGGCCTTCAACCACCCCTTGGTAAAATTCCCCAAGNTG
TTGTTTCCCCGGG

| | |
|---|---|
| Sequence 756 | cMhvSG069e08 |

TTGACCTGCTAATCAAGNCACACATGGTGAGCGNGGACTTTCCGGAAATGATGGCAGAGATCATC
TCTGTGCAAGTGCCCAAGATCCTTTCTGGGAAAGTCAAGCCCATCTATTTCCACACCCAGTGAAGC
ATTGGAAACCCTATTTCCCCACCCCAGCTCATGCCCCCTTTCAGATGTCTTCTGCCTGTTNTAACTA
TGCACTACTCCTCTGCAGTGCCTTGGGGAATTTCCTCTATTGATGTCCTCGGCCGCCCGGGCAGGTA
CCCCGGGGGACAGATNCTATTATTATTTCCATTCTACCGAGAAGGAGACTAAGGCTCTGATCATTT
AAATNAGTTGCCTAAGGTGATGCANTGATATAAGTAGCAGAGCTAGGAATTGAGCCTTGGTAACT
TTAACTCTGGACCCNAAGTCCTTAGCTACTAAGCTTTTACTGCATGGGGTTTTNAGTCANAATTAA
AAAACTTTTTTGGAATATGGAGGGTAACNTTTTTGGNGAATTAGCCTTTTGGTGGNTAATTTTNTTT
GNGCCTNATTTGNCCCAACAAAAGNCTAATTTTTATTT

| | |
|---|---|
| Sequence 757 | cMhvSG070g11 |

ACCAGCCTTTGGGAAGTCGTGTGAATACCTCGGTCTCTTAGCCACAGGGATAGAATGGCGGCCTGA
CGGAGCCGCGGCGCCGGCGAAGTCGCTGAGGCGCGAGCTGGAACCCCCAGACCAGCTCAAACGG
GAGCCAAAACTCGAAGCTTGGAAGAATTAGCAGGAAATGGCGGATGAGGCGTTGTTTTTGCTTCT
CCATAACGAGATGGTGTCTGGAGTGTACCTCGGC

| | |
|---|---|
| Sequence 758 | cMhvSG070g11 |

CGCGCTTGGCCGTAATCATGGGTCATAAGCTGTTTCCTGTGGTGAAAAATTGGTTATCCC

| | |
|---|---|
| Sequence 759 | cMhvSG072g01 |

ACCATAGTTGAAGTCTTCAACAATCCCATTAAACTTCAAGCAGAATGGCCTCCACTTCTCTTTGGCT
GATTCTGACTTGAGTTCTTCTGGGTCCAACACATCTATCCTAAGGGTCTCAAAATTTTTCCGGAACT
CAGAGTAAATTTGGTCATCTACTTTGGTGAGTTTCAGGAACTGTGGGTCAACTGATGAAATCAGCT
TGTAATAGACTTCAGCATGCTGCATTGCTCTCATGGCCCAAGCCATCTCAATGTCAGGATCGTTGC
CATACGACTCTGCTGGGAGAGAAAGCGCATGTGCCACAGACACCAACTCCCCGGAAACCGGCTCA
TCAGTTCCACTGGTGGCCGCCATCTTGCAACCCCCGAAAGCGTGGCTCCTTCCGCAGCTGATTGCC
CGCGT

| | |
|---|---|
| Sequence 760 | cMhvSG072g01 |

CGGGCTGCAGGAATTTCGATATCAAGCCTTATTCGATACCGTCGACCCTNGANGGGGGGGCCCCG
GTACCCCANCTTTTTGTTNCCTTTTAGTTGAGGGGTTAATTGCGCGCTTTGGCGTNANTCAATGGGG
CATAGCTGGTTTCCTGTGTGAAAAATTGGTTATTCCGNTCNCAATTTCCACAACAANCATACGAGN
CCGGGAGCATAAAAGTNGTAAAAGCCCTNGGGGTGGCCTTAATGAGGGGNGCCTTACTCACAATT
AAATTTGGGGTTGGGGCTTNNTGCCCCNCTTTTTCAAGTCCGGGAAAACCNTNTNCGTGCCCNNCC
TNGCATTTAANTGAATTNGGGCA

| | |
|---|---|
| Sequence 761 | cMhvSG073g03 |

TCGAGGTACTTGTGACAGGCAGACGTGATTGCAGCCACGAACACGATGAACTCACTGAAGTCCAC
CTGGGCATCTCCATTGGCGTCCAGGTCCTTGAGTAATTTATCCACGGCATCCTTGTCTTTTCCACTC
TGCAGGAAGCCTGGTAGCTCCTTCTCCATCAGCACCTTGAGCTCCCCCTTGGTCAGGGTCTGCGTG
CTGCCCTCGCTGCCCGAATATCGGGAAAAGACGTCTATGATCATGCCCATGGCTGTCTCTAGTTCC
CGTCATGGTGCTAGATTCAAGACCCACCTTCCTCCTGGGGGGCTGGCAGGGCCCGAGAAAATGTCC
CCCGCGTACCCTGCCCGGGGCGGCCCGCTTCTTANAANTAGTTGGATCCCCCGGGCTGCAGGGAA
ATTCGGATATCAAAGCTTTATCCGATACCCGTCGACNCTNGAGGGGGGGGCCCGGTACCCAAGCTT
T

| | |
|---|---|
| Sequence 762 | cMhvSG078h09 |

AGGTACTTGTGACAGGCAGACGTGATTGCAGCCACGAACACGATGAACTCACTGAAGTCCACCTG
GGCATCTCCATTGGCGTCCAGGTCCTTGAGCAATTTATCCACGGCATCCTTGTCTTTTCCACTCTGC
AGGAAGCCTGGTAGCTCCTTCTCCATCAGCACCTTGAGCTCCCCCTTGGTCAGGGTCTGCGTGCTG
CCCTCGCTGCCCGAATATCGGGAAAAGACGTCTATGATCATGCCCATGGCTGTCTCTAGTTCCGTC
ATGGTGCTAGATTCAGACCCACCTTCCTCCTGGGGGGCTGGCAGGGCCCGAGAAAAATCCCCGCG
TACCTGCCCG

| | |
|---|---|
| Sequence 763 | cMhvSG078h09 |

ATTGGGTATCCCGGTCACAATTCCACACAACATACCGAGCCCGGGANGCATAAAAGTGGTAAAAG
CCTGGGGTGCCTAATGAAGTGAGCTAAACTCACATTAATTTGCGTTGGCGCTTAACTGCCCGCTTT
TCAAGGCNGGGAAACCTNGNCCGNGCCCACCTNGNATTNAATGAATCGGGGCCAACCCCCCGGGG

| | |
|---|---|
| Sequence 764 | cMhvSG023h11 |

ANCACCATTCTTAGNGGAGCANGATTCTTGAT

| | |
|---|---|
| Sequence 765 | cMhvSG040e03 |

TCCACCGCGGTGGCGTCCCAGCCACTCAGGAGGCTGAAGTGGGAGGATCGCTTGAGGCCGGGATT
CGAGGCTGCAGTGAGTTGTGATCATGCCACCACTGCTCTCTAGCCTGGGCAAGAGTGAGACTCCGA
CTCAAGAAGAGAAAAAGAAAAACCTTCCAGGGGCACATTTATTTGTAAACCATTCCAGAGGATAG
AAAAGAGATGTAAGGCTCCCTAATTCATTCCATACGGTTAGCGTAATCCTTATAGCAAACTGCACA
AATAAAACACAAGGAAAACTAAACCAAATTCAATTAATGTAGGTGCAAAAAATCCAAAATAAAA
CTAGCAGTTTGAATTCAGCATTGTAGCAAAAGATATATCATTTTCAAGGAAGATTTGTACCT

| | |
|---|---|
| Sequence 766 | cMhvSG052d02 |

ACCNCGGTGGCGGCCCGAGGTACAGTGTCCATGTGTNTACCTGATACTTTCACATGTCATNAAANT
NNANGCANCCAGACACAAGTAGCCATGNATCTTGGCACAT

| | |
|---|---|
| Sequence 767 | cMhvSG064e10 |

CTCNTATAGGCGAATGGANCTCCCCGCGGTGGCGGCCGNGTCCTTTTTTTTTTTTTTTTTTTTTTT

| | |
|---|---|
| Sequence 768 | cMhvSB024h11a2 |

CCCTTAGCGTGGTCGCGGCCGAGGTACTGATGGGACAGCAGCCAGTGCCACCGTGGCCATAGCAG
GTATCCATTTCCAATGGTATAACTTGTCTGCCTTGGAGCAGCACATTTCTGATGCCCTGGGTCAACA
TTTCAGATTGTAATGAATGTCAAACAACTGTTACTGAGATTCTTGTCTGATATTCCCTACACCTTTT
TTCTAGAGAGGAGCATACTCCAGTATTTTGATTATTCTCTTCATAAAGGATGGGATATGCTCATTTC
ATCTATTCAAATTTTTAGATTAACTTAAGATAGCTAAAAATTTAAATATCTAAAATGCTGCCAAAA
TAAAAGAGAAAACACATTTGGCTTTACTCTCTCAACTTTGTATGTGAGAGAGAACATTCCTGTGTT

| | |
|---|---|
| Sequence 769 | cMhvSB026e02a2 |

ACCACAATCACAAATGCAGCACTGTTTACTGACAGGACCATTACTCTGTCAAAATCAGCACATCAA
AAATATTATCCTGGAATCTAAAATAGTAGTCAACTGGGTTGTTAAAGCAAGGGATTGCTATAGATC
TACAGGACAAAGTTCCATAGTGAAACACAAACTCCTGGGTTAGTCCTAGGCCAGGCAGGTGACCA
TAAATGTTCACATTCTGGTAGAATCCCATTTTCTAAAAATTATACAAACACATCGAAATCACTAGA
TTTTATATATATATACACACACACACACTTATGTGTATATATACATATACGTATTTTGTGTGTGTGT
GTTGTGTTTCCAGCAGCTAATAGCAGCTAACATTTATTGAGCACTTACCACATGCCAGGA

| | |
|---|---|
| Sequence 770 | cMhvSB026e03a2 |

CCCTTTCGAGCGGCCGCCCGGGCAGGTACTCAGCTGGCTGCATCACTTATTTTCCTTTCAGACCTGT
CTCCTGTAGGTAGCCATGCTTGTGTCCCCAAAACTATACTGTCTTCCTAATCTTTTCTTCCAAATGA
AAATCGACCACCCAAACCCAAATTTCTTAAGCAGGTTACAAAAATGTTTAAACCAAGTTATATATA
AACTGCAGTCATATTCTCCAGAAATACAAATTAATATGGCATCTAGTTTACTCCCTCTCTTTGGACC
CCAGTTCCACCTTGCTTTCACTCTCACAGGCTTTCTCCTTGGCAAAGCAAATTTAAGAATGAAACTC
TATACACAACCTCTTTTTTCAATGGTGCTACTGTATTCCCCTCTTCAAGGGTTAGAGAGTTTTTCTA
C

| | |
|---|---|
| Sequence 771 | cMhvSB026f01a2 |

CCCTTTCGAGCGGCCGCCCGGGCAGGTACACGTGTGCACGCACATGCACATGAACACAGGAATGT
TCTCTCTCACATACAAAGTTGAGAGAGTAAAGCCAAATGTGTTTTCTCTTTTATTTTGGCAGCATTT
TAGATATTTAAATTTTTAGCTATCTTAAGTTAATCTAAAAATTTGAATAGATGAAATGAGCATATC
CCATCCTTTATGAAGAGAATAATCAAAATACTGGAGTATGCTCCTCTCTAGAAAAAAGGTGTAGG
GAATATCAGACAAGAATCTCAGTAACAGTTGTTTGACATTCATTACAATCTGAAATGTTGACCCAG
GGCATCAGAAATGTGCTGCTCCAAGGCAGACAAGTTATACCATTGGAAATGGATACCTGCTATGG
CCACGGTGGCACTGGCTGCTGTCCCATCAGTA

| | |
|---|---|
| Sequence 772 | cMhvSB027g06a2 |

CCCTTTCGAGCGGCCGCCCGGGCAGGTACCTATGACCATCTTACATTATTTTTATGGGTGGGGGGC
ATTGACTGTGGAATGTGGGCAGTAACTTGCACAGTCAGTAACCGTTTGAGTAACTTCTTGTTGGCA
TCCCCATTCTGGCACTCCTCCTCTAGGTCTCCACCTCACACGCTGGTTTGTGGGCGGAGGGGCAGG
TTGGTGCGTGGGGTGTCCGGGCACTGGCTGTGCATGCCTTCTTCCTCTTCTGTCTCTTGGCCACCTT
TTCCAAAAAGTCACCAGTGACCAATTCTCCCAGTGTTTCTTTGGGACTCAATGCCTTGGGCTTGGC
ATTGGGTAAAGCCAACTGGCCAGTTTCATTCTGACGAGCTCTATAGTAGTCCGGTGTGGACCTCTG
CCCTCCCTGCTCTGCGGAAGCTTCCTCAG

| | |
|---|---|
| Sequence 773 | cMhvSB027h07a2 |

ACGCGGGAGGCTGTAGGAGAACAATGAAAGGGAGGATGAAGAGATGGGTAAGTGAGCCATACTC
AAGGGCACATGGTGTTTCAAAAACACCTCCCACTATTTGGCTTTTATCCTTGAAAGAGAGCTCATA
AGAAAGTTTCACCAGGCCCACTGAAGTAGAAAAGCATAATAATATACTTGGTGAGTAATCTAACT
TCTTTTTCTCCAAAGGCTAGTAATCACCTATAAATTAAAATAAAGCACTTAAGTTTTATAGCAAAA
AACAAACAAACTGGCGATTTTCACTAAAACCAAAAAAAAAAAA

| | |
|---|---|
| Sequence 774 | cMhvSB029a10a2 |

CCCTTTGCCGCCCGGGCAGGTACCATCCCTCTCCTGAGCTAGACAATTATCCTTTGGGTAGTGTGA
AACTGAGTGTCTCTGGACTCAGGACAGTGTGCAAACAGTGGGGTTAAGACATAGGTTCATGTATTT
AATTGAAGACTCCCTGCTTTCTCTTTCGGACTTGTCTCCCACACAATAGCAGCCAGATGTTTATCTC
TAAGCAGCAACTGGAATTTTCTCTGTGGTATCTGACTAGTCTAAGAGGAATAAAAGACCAAAGAA
GCTGGCATTGTGGCTCCCCAAGGAAATGGCCTAATCCATTATTCTAACAGTGGATGAACCCCTTTC
GTGTACCTCGGCCGCGACCACGCTAAGGG

| | |
|---|---|
| Sequence 775 | cMhvSB029b03a2 |

GGTACCTGTTACCTGAGTCAACAGATCCAGATGAGAGGTGTAGGCAGGAGGGTCATCTCTGTGCA
TTTAGGAAAAGCAGCACTGATGCTAGTAGAGCATCCAGTTCCCCAACATGATCACCCCTGAAGCCT
TAATTCCCAAATCCTTCCAAGCCTTATCTGTAGGGGCTTAATGAGGACAGAAAGGAAGAAACAGT
CACTCTGGCACAACAGGACAATATATTCAGATTAAATCTGAAAATGGTGGAGGCCTGCTGCCCAT
GAATTCTGAGCCTCTCCAACCCTGGTCCCATAATGAAACTAGTAGTAGGGTCTTCCAAATGGCATT
AGACAAGGGTTCCATCTGTGTAAGGACCACTGGGAGTTAGACTGGACCCAGGATGGTATGCCATG
TGCAGCCATGTCAACCCCCAATTTGC

| | |
|---|---|
| Sequence 776 | cMhvSB029c11a2 |

ACGCGGGGATTTAAAAAAAAAACAACACCTATATAAGGGAGTGATCTACCATAATAAGATAACAG
AAACAACAAATGAAAATATTAGTACCCTCTCCCTGAAAATTTGAGTAATANATTATTCTGAAGTAC
TGTACTTCATTAAAAAAAAAAAAAANATNACNTTCCTTGTAAAATTACCGTTGTTNTNTGTCCCNC
CAAAAAAAAAAAAAA

| | |
|---|---|
| Sequence 777 | cMhvSB029f01a2 |

CCCTTTCGAGCGGCCGCCCGGGCAGGTACGCCTCACCCAACTCAACTCTTCACATAGCTCAAGTCT
TGGCATAAATGATATTTCTCAAGAGATACATTTTCTGACCACTTTATCCTTGTCTTTCCTTCATAATT
AATCCATAACATTATGCTTGTTAGCTTCCTTCATGGTATATATCATAGATTGTCATCATATATTAAT
ATGTTTGTCTATAGACTGTCTCTCATATTATATTCTACCAATATGAGTGCAGCATCCATATACCATA
GACCTAGCATGGTCTTAGATAACTAAGATCAAATAAATACAAAAGTTCAAGGGCAAATAATAACG
ATAATAATTAGGATTCTCAAAAGCATAAAGGTATGTTTTTAAAACTCTCAGGTATTAATAAAAATC
AATACCCAAAATTCTA

| | |
|---|---|
| Sequence 778 | cMhvSB030b11a2 |

ACGCGGGGTCACCTGCTGTGCTCTTGCTTGCACAGTGTCCTGGAGCTGGACCTGGCTCTGGGTTTC
CAGGAAGCAGTTTGACTAAAGGCAGCAAGCTGCTTCCTCTGCTGCCTGAGATACCAGATTCCCAAT
GGCGAAGATTGAGAAAAACGCTCCCACGATGGAAAAAAGCCAGAACTGTTTAACATCATGGAAGT
AGATGGAGTCCCTACGTTGATATTATCAAAAGAATGGTGGGAAAAAGTATGTAATTTCAAGCCAA
GCCTGATGATCTTATTCTGGCAACTTACCCAAAGTCAGGTACC

| | |
|---|---|
| Sequence 779 | cMhvSB030f03a2 |

NGTACTTATAGGCAATAAGGCGAGTCTAAGACCTAAACTAGATAATTTGAGAACAGGGAAAAAAN
ATTCCATTTCGATTCCTGAAGGTTACCCCCATACCTATTATAACAGAATAAAATAAAATAATTCNA
AACTGCACAACCTCTAACTTATCAAATCCTATATATGCCTCATTTTCTCAAATGACTCCTAATTTGT
GTAAAGAAAAAGGCAAAAAGAGAAAGGACAGAANTATGTCAAGGTGGGCTAAAGCTATGAATAC
CCTTTTATGTAAACTAAGAAAAAAATANATACACACGCATTTTTTAAAAGGGAACTTTTTGAAACC
TTGAGCCGCAAAGAGGAAAAATTCCTGGCTAAATTGCACCACTCAAAGACAACTAGACTTACGGT
CATAAATTTCTTCTCCAACCCATTTCTTTCAGGATTCTTACAGATCCATAGCATTTTGCAAGCTGAC
ATAGGACCCTTTCA

| | |
|---|---|
| Sequence 780 | cMhvSB038a01a2 |

CCCTTTCGAGCGGCCGCCCGGGCAGGTACGCGGGTAAATCGAATTAAACTAAATTAAACATTTTTC
TTTCATTAGTAATATTAAAACACTTAAAGCTACATTGAGTGATAGCAAATTAGTAAAGCCTATTAA
GTCTTCTATGTAAAGTATGATTCAGAAATATATATTTTATATATATATGCATGATCTCGGCTCACCG
CAACCTCCGCCTCCCAGGTTCAAGCAGTTCTCCTGACTCAGCCTCCCTAGTAGCTGGGATTACAGG
CATGTGCCACTACGCCCGGCTAATTTTGTATTTTTAGTAGAGACNGGGTTTCTCCATGTTGTTCAGG
CTGGTC

| | |
|---|---|
| Sequence 781 | cMhvSB038b08a2 |

NCGCGGGAGGCCATCTCGCTATAGGAAAGGAAAGTGGAACAGCATTCATCCTCAACATTTTTACN
AAGACAAAATGAANACTGGAGTANAAGACTGATCAGTGCAGGTGTAGCATAAAAGTGTAATCCTG
GAAGATGTGGTGTGAGAAGGTAGCACAAGTGAAGCAGAGATACAGGAGATANGGAAGGGAAGCT
GGAANCAGANGTCACTGGAGGGAGAGGGAGATNGACACATTCAGGGCTACNAAGCAAGTTCTAT
GTGATNNGCTCACCTCTCAATTGTGGNGACCCCTC

| | |
|---|---|
| Sequence 782 | cMhvSB038c01a2 |

CCCTTTCGAGCGGCCGCCCGGGCAGGTACCTCTTATTCCAGAGAAGTGGGGAGCAGAGAGGAAGA
TGGAGTGGAAAGGGGCGAGACAAGGCCCTCCTGAAATACCTCAACCCAAATCTTCAAGAAATCCC
CAAGTCCCCACAGTGCTTTTTGTGGATTTTTGTGGAAACCGGTAAAAGGGGCTGATTTGCTGGCCC
CAGTGGGTAGAAAACAGAGACTGTCAAGAGAACAGAAGAGAAGGCAGAAAGGGGATGGGGAAG
TGGGGTTCGCCATGTTCACGAGCTCCTGGAGCCACAGGGCCCCCCAGGAACAACAGAGCTGAGAC
TGGGTGGCCTTGTTTCTGGCCCAATTCCCTGGGACC

| | |
|---|---|
| Sequence 783 | cMhvSB038g08a2 |

CCCTTTCGAGCGGCCGCCCGGGCAGGTACGCGGGAATGATTTATTTGAGGGTTTGGTACATCTTAT
ACAACCGTGAATACAATTTGCATCTAATAATGTGACTTCAGTAGTATCATGATTTTTGTCCAAACCT
TCTCAGTCTGGGAAACATTTAAAGAGAATAATGACCTTAGAGAAGAGCTGGATTTCTTTTAAGACT
TNTATTCAGATCAGGACACAATCACGTTCAAAATTGACATNANCATGTAACATGGATTTCAGTGAA
GAAAAGTACTTNAGAATCAAATTTTAGAAGAGTGTTTTAAGGTTTAGTGGCCCTAATCAAAAGGA
NGTCAAAAANCTNTTTTTTTGGTTAATCCATTAGGGNGGNGNGGANCCACCNGGGGTTTTGGCCTC
TTNGGTTTTNNTTTTGAAATTTGGCCCAGGGGGCTACCTTTGGTCCANTTTTTTNGGGGGAAGGGA
AATNANATTGGGNCNCNAAAAACTTTTGGGGGNAAAAANTTANAANAAATTTTTTTNNTTTNNCTT
TTGGNAAAGNCCTTTNCCNGGCCNTTTTTTTAAAAAAAAAATTGGCCTTTCCGATTTTTTTTNAAAT
TTAAAAATTTNGGNTTTTTTTTTTGGAAATTTNGNTTTNAAAACTTGGGGGTTCTTTTNCCCCCCTTT
TTTTTTT

| | |
|---|---|
| Sequence 784 | cMhvSB049c05a2 |

AGGTACGCGGGGGACCTGCTGTGCTCTTGCTTGCACAGTGTCCTGGGAGCTGGACCTGGCTCTGGG
TTTCCAGGAAGCAGTTTGACTAAAGGCAGCAAGCTGCTTCCTCTGCTGCCTGAAATACCAGATTCC
CAATGGCGAAGATTGAGAAAAACGCTCCCACGATGGAAAAAAAGCCAGAACTGTTTAACATCATG
GAAGTAGATGGAGTCCCTACGTTGATATTATCAAAAGAATGGTGGGAAAAAGTCTGTAATTTCCA
AGCCAAGCCTGATGATCTTATTCTGGCAACTTACCCAAAGTCAGGTACCTGCCCG

| | |
|---|---|
| Sequence 785 | cMhvSB049c11a2 |

TAGCTGTTTCCTGTGATGGTAAAAGGACCGTCCACCGCGGTGGCGGNCGCCCGGGCAGGTACGCG
GGAATGATTTATTTGAGGGTTTGGTACATCTTATACAACCGTGAATACAATTTGCATCTAATAATG
TGACTTCAGTAGTATCATGATTTTTGTCCAAACCTTCTCAGTCTGGGAAACATTTAAAGAGAATAA
TGACCTTAGAGAAGAGCTGGATTTCTTTTAAGACTTCTATTCAGATCAGGACACAATCACGTTCAA
AATTGACATAGCATGTAACATGGATTTCAGTGAAGAAAAGTACTTCAGAATCAAATTTTAGAAGA
GTGTTTTAGGGTTTAGTGGCCTAATCAAAGGGAGTCCAGAAGCTATTTTTGGATAATACATAGGAG
GTAG

| | |
|---|---|
| Sequence 786 | cMhvSB063b04a2 |

GCGCGTCNTGGCGGCNTCCGCCAACTGATTGGGCGAACCGTCCAGGTCCAGCTTGCCGTGCANCA
GGCTGAGACTGGCCGCATTCGCGCCGCCGCCGCCCAGGCTGTCGAACANATTGCCCGACAGGCCG
GCCGAGAAGCCGCGGATCGTGTAATTGCTGCTGGTGGCGCCGTTTGCCTCGTTGTCGAAACGCTTG
TCGTCATAATTGAGTTGCAGATACAGATTGCGCAGGCGCGAGCGCAGCAGCGGGTAGCTGGCGTC
GACGCCCAGCGTGTTCGAACTGCCCTTGGCGTGCAAGGCGGCAAATTCNTCGGCC

| | |
|---|---|
| Sequence 787 | cMhvSB063b12a2 |

ACACGTGTGCACGCACATGCACATGAACACAGGAATGTTCTCTCTCACATACAAAGTTGAGAGAG
TAAAGCCAAATGTGTTTTCTCTTTTATTTTGGCAGCATTTTAGATATTTAAATTTTTAGCTATCTTAA
GTTAATCTAAAAATTTGAATAGATGAAATGAGCATATCCCATCCTTTATGAAGAGAATAATCAAAA
TACTGGAGTATGCTCCTCTCTAGAAAAAAGGTGTAGGGAATATCAGACAAGAATCTCAGTAACAG
TTGTTTGACATTCATTACAATCTGAAATGTTGACCCAGGGCATCAGAAATGTGCTGCTCCAAGGCA
GACAAGTTATACCATTGGAAATGGATACCTGCTATGGCCACGGTGGCACTGGCTGCTGTCCCATCA
GTACCTNGGC

| | |
|---|---|
| Sequence 788 | cMhvSB063d06a2 |

AATTGGAGCTCCCCGCGGTGGCGGCCGAGGTACGCGGGGGGCCGGAGCCGGGCCGGGCAGCTAG
CAGGGCGCTTCGGTCTTAGGTATGTCTTTATCAGCAGCATAAAAACGGACTAATACAAGTACACAA
GAATACAAAGAAAAGAACAGCAGACACTGGGGCCCGCTTGAGGGTAGAGGATGGAAGGAGGATG
TGGATCAAAAGCCTACTTATCAGGTATTACGCTTATTACCTGGGTATTGAAATAATCTGTATACTG
AACCCCTGCAACACGCAATTTACCCATATAACAAACCTGCAGACGTACCTGCCCGGGCGGC

| | |
|---|---|
| Sequence 789 | cMhvSB065d05a2 |

GATTGGAGCTCCCCGCGGTGGCCGGCCGNCNNGACNNGTACTNNATTCACGCCTGCACNNGTTTA
AAGCCTGTNTTATNTATANNTGTCCNGTCATGGGGGGNNCTTTGACTCTTATGATNCANTGNNGAA
ACNTGGATTNNNTNTCCNNTNNNCTNNTGNTGGGGANATGCTTTCTNNNAGTGACGGCAATGGAA
ATATCAAGCAACCAAGGGAAATCTGAAGATCCCAGAGAGCCCAGCAAGCAGCAACATCCTCGAGT
TAGGCAAGCAAGGGCCCGGAGCTGGCCAGACCATGGGCTGGAATGCAGTGGGGGCCGGTCAGAG
GGGCTTCTTCTGGGGTCCTGACTGTGGTTTCTGCCAGAGGTGGAGCAAGTTGGAACTGGATGTTGA
GTGAAGTTTCAAAGAACTTAAAAGTCAAATGGGGAACAATAATCAAAGGCTTCCATT

| | |
|---|---|
| Sequence 790 | cMhvSB065e04a2 |

CGAGGTACGCGGGACCTGCTGTGCTCTTGCTTGCACAGTGTCCTGGAGCTGGACCTGGCTCTGGGT
TTCCAGGAAGCAGTTTGACTAAAGGCAGCAAGCTGCTTCCTCTGCTGCCTGAGATACCAGATTCCC
AATGGCGAAGATTGAGAAAAACGCTCCCACGATGGAAAAAAAGCCAGAACTGTTTAACATCATGG
AAGTAGATGGAGTCCCTACGTTGATATTATCAAAAGAATGGTGGGGAAAAGTATGTAATTTCCAA
GCCAAGCCTGATGATCTTATTCTGGCAACTTACCCAAAGTCAGGTACCTGCCCG

| | |
|---|---|
| Sequence 791 | cMhvSB065g08a2 |

AGGTACATGGTCTTTGAACTCTCGTGTCGAAAGAGTTGAACACAACTAAACTTTAATGTGAAAAGG
TCTCAAGTAGTTAATCAGAAATGAGAGGCGCACATAGCATTTTATACTGTTTTCGATTTGCTGACA
CAACATCATTCTGTGCTCTCTAGTGAGCAAGAGTAATCCTCAATAGCATTAAGACGAAAGGCTGAA
CACAAAACCGCAGGCAAGTCAAGTAGTGATTTTATTCTTTTTGTCATTTTTCTTTCAAGTGGAAGAT
CCCTAACACTCTCTGCTCCTGACAATGTTTATAAACAGAACTCTGAGAAGCATCTGAATGTAAAAA
A

| | |
|---|---|
| Sequence 792 | cMhvSB071b04a2 |

AATTGGAGCTCCCCGCGGTGGCGGCCGCCCGGGCAGGTACGCGGGTATTAAATTTCCAATGTGAT
GTGGCTTCTGTTTGGATAGAGATGGAGCTGGTCTATGTTTCTTTACTCTGTGTTCATAGTATCAAAG
TAAGCTTTGTATCTGTTTTTCTGTAATGATGACATTTACACTTGGTTGCATTAATATGAAGTAACAT
GGATTGCGTGTGTTAGTAGGTTCTTTTTAATTACTGTGTAAAAATAATATGTAATTGAAACAAAAA
GCATTGTTTCCAATCCTAATTTTTTTTCCTCAAGTCCATCCTGTCAAGCTGCAAGCGTGAAAGTTAT
TTTCTGGTGGTGTGATTAGATTGGGGCTGAACCCTCCAGCTG

| | |
|---|---|
| Sequence 793 | cMhvSB071d02a2 |

ACCTGACTTTGGGTAAGTTGCCAGAATAAGATCATCAGGCTTGGCTTGGAAATTACATACTTTTTC
CCACCATTCTTTTGATAATATCAACGTAGGGACTCCATCTACTTCCATGATGTTAAACAGTTCTGGC
TTTTTTTCCATCGTGGGAGCCGTTTTTCTCAATCTTCGCCATTGGGAATCTGGTATCTCAGGCAGCA
GAGGAAGCAGCTTGCTGCCTTTAGTCAAACTGCTTCCTGGAAACCCAGAGCCAGGTCCAGCTCCAG
GACACTGTGCAAGCAAGAGCACAGCAGGTCCC

| | |
|---|---|
| Sequence 794 | cMhvSB071e04a2 |

AGGTACCTGACTTTGGGTAAGTTGCCAGAATAAGATCATCAGGCTTGGCTTGGAAATTACATACTT
TTTCCCACCATTCTTTTGATAATATCAACGTAGGGACTCCATCTACTTCCATGATGTTAAACAGTTC
TGGCTTTTTTTCCATCGTGGGAGCGTTTTTCTCAATCTTCGCCATTGGGAATCTGGTATCTCAGGCA
GCAGAGGAAGCAGCTTGCTGCCTTTAGTCAAACTGCTTCCTGGAAACCCAGAGCCAGGTCCAGCTC
CAGGACACTGTGCAAGCAAGAGCACAGCAGGTCCCCGCGTACCTGCCCGGGCGGCCGCTCGGCTC
TAGAACTAGTGGATCCCC

| | |
|---|---|
| Sequence 795 | cMhvSB073b05a2 |

GATTGGAGCTCCCCGCGGTGGCGGCCGCCCGGGCAGGTACACAAAACAGAGATGCACAACTACCC
TACCACCTGGGCAAGAAACGGGCTGCCACCTGGCATCTAGAAGCAGCCCTGTGACCCCAACCGCT
ATACTACACCCTTCTTCACCTCCACTGCTAAGTTCATAATCCTTTAATCTATCATCCCCACGTGTTG
AAGGCAGCTCCCTTCATAATTCTTACATTCAATTCCAAAATTCTGAAACT

| | |
|---|---|
| Sequence 796 | cMhvSB073g06a2 |

NGATTGGAGCTCCCCGCGGTGGCGGCCGAACGCGCGGCCCTGGAGTTGCGTCGCGATGAAGCCGT
ACGCGCGCTGCAGGACGAAGACAAGCGCTACCAGATCGTCAAGGACATCGCCGATGACCTCAAGG
TCGGCTACAACA

| | |
|---|---|
| Sequence 797 | cMhvSB075b08a2 |

CTGATTGGAGCTCCCCGCGGTGGCGGCCGAGGTACTTCTAGAATCCACAGCTCTGGGAGGGCTACC
TTAAATTAACACTGGCAGTTCTTTGCAATTAGGGTGCCATAAAAGCAGCACAGTTGACTCCAAAAT
GGACTGAGTTTTGGAAAGATGTCTGCCAGCAAAATCATATAGACTTTCTTGCTGAAGGGATGAAA
AATTAATAATGCCTTGAAGTATATTAATATAAAAATATGTGACCAAGCAGTGTAATTAATTCCCCT
TTTTCCTCAAAATGTAGCCTTTTTTTTTTGANATGGAGTTTCACTCTGTCACCCACGCTGGAGNGCA
GNGGNGCGATCTNAGCTCACTGCAACCTCAACCTCCTGGGTTCAAGCAATTCTCCTGCCTCAGCCT
CCCAAGTAGCTGGGACTACAGGTGTGTGCCCCATTCCCAGCTAATTNGTNGGATTTTTTTT

| | |
|---|---|
| Sequence 798 | cMhvSB075d02a2 |

AGCGCATGTAGTCGTAGCGGTCGGCCGCCAGGCTGCCGCTCTGCTCCTTGTTGCGCACGATGACCG
GGCGCAGGAAGATCATCAGGTTGGTTTTCTTGCGCTCGCGCGTCTGGTACTTGAACAGGTTGCCGA
TCAGGGGAATGTCGCCCAGGCCGCGCACTTTCTCCGCGTTGTCGCCCGTGGTGTCCTCGATCAGGC
CACCCAACACGATGATCTGACCATCGTCGGCCAGCACATTGTTTTCGATCACGCGGTTGTTGATGG
TGATGCCGCTGACGGCCGACGCGGTGGATTTGTCCACGCTCGACGTCTCGTGATAGATACCCAGCT
TGATCGTGCCGCCCTCGGAAATCTGCGGGCGCACCTTCAGGGTCAGGCCCACTTCCTTGCGGTCGA
TGGTCTGGAACGGGTTCGTATTGGT

| | |
|---|---|
| Sequence 799 | cMhvSB075e06a2 |

CGAGGTACGCGGGTCTTCTCTCCTCCTTATGCCTTTTCTTCTTCCTCCTCACCCTCATGGCTCCAGGT
CCATGCCCAGGGAGCATGTTAGCATGTTGTCAGGTCTCAAAGTATCTGAAAAGATTGTCTTCTCTG
TGGCCAGGCTGCTTAGAGGCAGCCTGATATAAACTGTAAAAAGGGGGAGAGTGTTTCTCTGTGTCC
TCTGCATCCACTCTTCATGCATTTGCTCCAAACCAAATCTGCTCTTAGGAAGGGATCAGACGAACC
TGTTTAGAGTGAGGTAGCAATGATAGGTTAGCAGTGGGTAAACCACATAAATGAAACTTTAAATG
AGGAATTCCACCTTGTTAAAGAAGTAAGGTGGGCCAGGCACAGTGGCTCACGCCTGTAATTCCAG
CACTTTGGGGGGCCAAGGCA

| | |
|---|---|
| Sequence 800 | cMhvSB075f02a2 |

TGATCCCTNANGCTCCAGCCTTCGGGAAGATATGTCTACAATGACCTTTGGCCACTGACAAAGAGG
AAGTTATCTGGAAGTTTGCAAACCTCTGTTCAACTCTCTATCCACCCCTTGGAAGGACCTTTTCAGA
GGAAGANAACAGAGTTTGTTTTTCAAATCATTTTCACCATATCTAAAACTANCCACTCNGCTTGGT
GATAGGACATCCCTATGAAACACACATG

| | |
|---|---|
| Sequence 801 | cMhvSB075h08a2 |

CGTGAGCCTCGCGGATGTGGCCAGGGAGCCGTACATTTTCCTCACCGTCGACGAGGCCGAACAAA
GCGCCATGCGCTACTGGGAACAGGCCGGGCAAACGCCCAAGGTGCGGCTGCGCACCAGTTCGGTG
GAGGCGGTGCGCAGCATGGTCGCCAATGGCAGCGGCGTGGCAATTCTGTCGGACCTGGTGCATCG
CCCGTGGTCGCTGGAAGGCAAGCGCATCGAAACCGTGAGCGTCACCGACAAGGTCACGCCCATGA
GTGTCGGCCTGGCCTGGCACCGCGAGCGCGACTTCACCCCGGCGATGCAGGCGTTTCGTGATTACT
TCCACGATGCATTCCTGGCGCCGCANCAGTTGTCGGCCCGGCGTTAAAGCCGGGATTGCAGGATCG
CCGCCAGCCAATCCATGAACACCCGCACCCGCTGCGGCAAATGCCGTTG

| | |
|---|---|
| Sequence 802 | cMhvSB079b02a2 |

TTGGAGCTCCACCGCGGTGGCCGAGCGGCCGCCCGGGCAGGTACTGGGATGAGAAGCTCAAGTCC
CTGTCCTCAAAAATTTACTTTCTAGCATTGATGAATAATCAGTCTTCACTATTTATGATTAAAAAAA
CTTTGTTCATCATATGCTTTATTTAAAGATTGATAATCTGTTCTCCCATTACCTGGCCACTTGCTCTT
TGCTCTCCTAATTACTTCTTAGGACCTTTAGTAGCTTTCTTGTTTTCTGAGTATGGACGTTTTCCCTC
AAGTAAGACACTACTAGTCGCTGGGTGCGGTGGCTCACGCCTGTAATCCCAGCACTTTGGGAGGCC
AAGGCGGGTGGATCACTTGAGGTCAGGAGTTTGAG

| | |
|---|---|
| Sequence 803 | cMhvSB079e11a2 |

ACTACCAGGATGGCCGCACGGGCAACGCCAAGCTGGGCGACATGGTGGCGCTGGGCGGCGGCAA
GTTCCTCGTCATCGAGCAGGGCGCCGCGCCGTCGGGCAAGGTCTTCAACAAGCTGATGCTGGTCGA
ACTGAAGGGCGCCACGGACATTGCGGCTGCCGCTTTCAATGCGACGACGTCCGACCTGGAAAAAA
GCAGCATGGGCGGC

| | |
|---|---|
| Sequence 804 | cMhvSB080e06a2 |

CCGGGCAGGTACTGGGATGAGAAGCTCAAGTCCCTGTCCTCAAAAATTTACTTTCTAGCATTGATG
AATAATCAGTCTTCACTATTTATGATTAAAAAAACTTTGTTCATCATATGCTTTATTTAAAGATTGA
TAATCTGTTCTCCCATTACCTGGCCACTTGCTCTTTGCTCTCCTAATTACTTCTTAGGACCTTTAGTA
GCTTTCTTGTTTTCTGAGTATGGACGTTTTCCCTCAAGTAAGACACTACTAGTCGCTGGGTGCGGTG
GCTCACGCCTGTAATCCCAGCACTTTGGGAGGCCAAGGCGGGTGGATCACTTGAGGTCAGGAGTTT
GAGACCAGCCTGGCCAACACG

| | |
|---|---|
| Sequence 805 | cMhvSB082b09a2 |

AGGTACAATGTGGGACTTTGGTGGAACTGCCTGGGAGAACTTCATAATTACTACCCTGTATGTCAT
GCCCCTTGCAGGTAAAACAGAAGTGGCAGAGCAGAGGTCAAAGGCACAGATCAGCAAAGGGAAT
CCTACTGGATCCTGAGACTAGCCTGGAAGGGGTGTCATTTGTCACTGGGAATAGAGGTGCACGGC
CTGGTGGACCCTCCGAGAGAGCTTAAGATTCATTTTTAAAACAGAGGATTTAAAAGACACAATAG
GCATTGGAATCGGGTAGTAAGAAGAGAAAACCAGAGCCCCAAGTGAGGAAGTGGGTGATCTGTCC
TCACACAGTTGGTGGGGGAGCTGGGCCTCCCCACTGACTGGACTCTCAGGTCCTTAGGAGGTGCTC
TGTCCTGCACACCCCAAATGACCACCTAAATTCAGGCCTGAAGCAGTAAGAAGTACCTGCCCGGG
CGGCCGCTCG

| | |
|---|---|
| Sequence 806 | cMhvSB090b03a2 |

GGGCGAATTGGAGCTCCCCGCGGTGGCGGCCGAGGTACTCATTGGAGGATCAGCTCACCTGCTTTG
CTCTCGATGTAGCCTAGCTGGGTTTAGAGCCTTCCCTTGAATGAAGAACCCTCCCCAGCTGGAAGG
GGATGCTCTTGAAAGCTCAGCTGACAACACACATGGGCATCAAGTCATTGGCCACATTCATGCCTC
AAGTGTCCTAAAACCGAATATGATCAAAAGAAAACTGCTGTTCAGCAAGTGGAGACTGGCATGCA
GATTCCCTGGCCTGCAAGCCTAGTGTAAAAAGATACCAAATACTGCTGGAAGAATGAAAAGGATG
AAGGGATGTCATCAAAGTAGTTTTTTCACTTGATGGAAAAGACTAAAACAGCAAAGCAAGTTCAA
GATCAAACACAACACCACAGGGATCCTTTGATGAGAAGTGAACTTAAGACCATGAAATGCTGTT

| | |
|---|---|
| Sequence 807 | cMhvSB090c01a2 |

ATGTACANNTNNTGAANNNNCCNNCCTGCNAGANNTNAANATANNACNTATAAATNCCTTNGACC
TCCNGGGGGGGCCCATNTCCCNCNTNCTGNACCNATTCACTGANGGNAAATTGCCCNCTCGNGTA
ATNATGGTCATATCTNTTGCCGACCTTCTCACACCACATCTTCCAGGATTACACTTTTATGCTACAC
CTGCACTGATCAGTCTTCTACTCCAGTCTTCATTTTGTCTTCGTAAAAATGTTGAGGATGAATGCTG
TTCCACTTTCCTTTCCTATAGCGAGATGGCCTGTCCCGCGTACCTGCCCG

| | |
|---|---|
| Sequence 808 | cMhvSB091b10a2 |

NATTGGAGCTCCCCGCGGTGGCGGCCGAGGTACCTTATTTACACCCATGTGCAGGGCAAGGCAAG
CTAGATATTTGCTGTTGTTATTGGGGGGCAAGCTCAAGTTCAGAAATGGGAAGAAAGATGCAAGG
GGAAGGGCCATGTATCTATTGTGCAGGGAGGAATGGCTGCCAATTTTCCAGGCATGGTCTCCCATT
TCCCACCCAAAGGAGGAAGCCAACCTATTCAGAAGCCAGGTACCTGCCCG

| | |
|---|---|
| Sequence 809 | cMhvSB091c11a2 |

TNNTTNNNNGTGAAAACCCNNAGTNTCANTGANNATGNTTTCTNGCNGANNANNNCCNTCTATNN
CTNCNNGNGNNNNNNCTCCTNGGTAACGCNCNANTNCACNAGNNTNTATCTCCTACTGGCTGNAA
NACTCTCCNNACTCNCCCNCCTNCCT

| | |
|---|---|
| Sequence 810 | cMhvSB092a12a2 |

ACAGTGTGGCCTAAAACAGAAGAATGTTTAACTGCATGAAGGCAGGGTGGTTTGTATTGCTGGGC
TTGGTGTATATTTCTTTGCTATCTAGTTTAATATATTGAGCTTTACATCTGTGCCAGCCTTGCATGTC
CATATACCTTTGGCAGGCATTTCTAGTCAGGTGGCATGGGGCAAGGGGTGTGCTACGTTTTAAGTC
CCTCATTTCTCCAGCCTGTCCAGGTAGTGTCTACGTCTCCAACTCACTCAGGAAGGCAGGAGACTT
CCAGATTCACTCCACTGGTATCAAGAGTTAGGTTCTGGTGAGAGAGCTGGCAGAAGCTTCAGAGG
ACCTTGCGTCTTAACCTCCTCTTTTTTTTCCTGTCCTTAACAGCAAGTTGTTGCCTCTAATTTTCAAA
AAATCGCAACACATTTCCAGGAGACCTGAAATGCGGTGGACTGCTTCAACATTANATTNTTTTTGG
CAGACANGGATAGTATTTAGTGTAACGTCACCTATATGCTTATCAAATANGGGTAAGGGGAGTCA
TAATTATT

| | |
|---|---|
| Sequence 811 | cMhvSB092h02a2 |

GGAGCTCCACCCGCGGTGGCGGCCGCCGGGCAGGTACGCGGGATGTCCCTGAAGTCCTCCAGGCC
CACACCTCCACCCGCCTTCTGTCCTGTATCTGCGGAAATATTTATTTTCTGTAATGAACTTTCTTGG
GGCTCCAGACACCCTCTCAGCCTCTTCCCACACAGAACTTTGCCTACACATTCCTACTACCCCTGGA
ATTCTAACTCAGATGTGGGTAGCAGCTTCCTCAAAGAGAAACTTTTCCCAGCTGGGTGCTGTGGCT
CACACCTGTAATCCCAGCCCTTTGGGAGGCTGGAGTGGGCAGATCGCTTGAGCCCAGGAGTTTGA
GATCAGCCTGGGCAACATGGTGAAACTCCATCTCTGTGAAAAATACAAAAATTAGCCAGGTGTGG
TGGTGCGCGCCTGTAATCCCAGCTACTAGGGAGGCTGAGGTGGGAGGATTGCTTGAGCCCAGGAG
GTTGAGGCTGCAATGGGCTGCG

| | |
|---|---|
| Sequence 812 | cMhvSB093a10a2 |

GGAGCTCCCCGCGGTGGCGGCCGAGGTACGCGGGGACAGGCCATCTCGCTATAGGAAAGGAAAGT
GGAACAGCATTCATCCTCAACATTTTTACGAAGACAAAATGAAGACTGGAGTAGAAGACTGATCA
GTGCAGGTGTAGCATAAAAGTGTAATCCTGGAAGATGTGGTGTGAGAAGGTAGCACAAGTGAAGC
AGAGATACAGGAGATAGGGAAGGGAAGCTGGAAGCAGAGGTCACTGGAGGGAGAGGGAGATGG
ACACATTCAGGGCTACAAAGCAAGTTCTATGTGATTTGCTCACCTCTCAATTGTGGGACCCCTCAA
AATGTGTACCTGCCCG

| | |
|---|---|
| Sequence 813 | cMhvSB093b08a2 |

AAAATGGCCAAATAANGAGGGAAAGGTAATAGCTTTGCTGTCGTGACTACCACNATGAAAGGATC
TGGCTCANGCCCTCAAGGAGGGCATTCTTCCTTGCGTAGTTATTGAGAATATGGCTTTCTAGTTAA
AGTCTGGCTCTGCCCCTTAAGTCNGCAGGGTGAACACACCAGGCAAAAGAGGTGTGTGTGAANGC
CCACAAGTAAGGGGAGACACACCCTTTCCC

| | |
|---|---|
| Sequence 814 | cMhvSB093e10a2 |

GGGCGAAGCCGCCATGGTCGACCACCTGCACAAAGTAATACAAATCGTTCAGATCCTGCATGCCG
CCTCCTTGATCGTTCTATTTTTGGAACGCTGATGGCGAATTTTACCGTCTACCGCCTCTATCGTTGC
AAGAGTATTCTGACTCCATCGTAATGCACACCCTACAGGAGATCGAGATGAACACANTNNCAGGT
ATCTACAGCGCACCCNGCCAGCACTGGGTNGGCGACGGTTTCCCCGTGCGCTCGATGTTTTCGTAC
ACCGGCCATGGCAAGCAGCTGAGCCCCTTCC

| | |
|---|---|
| Sequence 815 | cMhvSB093g08a2 |

GCTCCCCGCGGTGGCGGCCGCCCGGGCAGGTACACATACATAAAAGAAAATGGCCAAATAAAAA
GGGAAAGGTAATAGCTTTGCTGTCGTGACTACCACGATGAAAGGATCTGGCTCAAGCCCTCAAGG
AGGGCATTCTTCCTTGCGTAGTTATTGAGAATATGGCTTTCTAGTTAAAGTCTGGCTCTGCCCCTTA
AGTCGGCAGGGTGAANACNCNANGCAAAANGAAGTGTGTGTGAAAGCCCANAAATAAAGGGGGA
GACACACCCTTTCACCCTTTCAAGCAAGGCCTTGATCCTTGCTCCCCCACAAAAGNTTGTNACCTG
GTTCTGTCCTCTAAAACATTCCANGAAGGTAAAGGCTGCAAGAAGAANCCTGGTTCTTTGAGCTTC
CAAAAAAAAAAGT

| | |
|---|---|
| Sequence 816 | cMhvSB094a08a2 |

TTGGAGCTCNCCGCGGTGGCGGCCGAAATACCGATATTGACTTCCGTAATGGTCGCGGCCGCCGGC
GTGTAGTGCAATTCCAGCGGCAAGGTGTGGGTGGCCGTGGCCATGCCTTGCNACACGGATACATA
CGGCCCCAAGCAGATTGCCCGTCAACTTGATCGGCTGCATCACGGGACGGGCGGCCTTGTTCGGCG
AGCTGAACTTCGCCTGCGTCACCTTCAAACCCTTGCACACGAGACTCANTTCCACCGTCGTCACGG
NGGCCAGGGCGCTGTCGCCGATATTCGTGGCGCTGACATTGCCGCCCAGGCTCAACGCCCCATCCT
TGGTTTGCTTGCTGACATCGACGCATTCCGTCCTGACGATGCTGCCCTGCGTGTAATGCGTCTGGTT
GACGGCGCCCGTGGCGGCCAGGTTGACGCCGGGCAGCCCCGTCACGGCGTACGACCAGGTATCGT
TGTACTGGCTTTGCGCCGTCGTGTAAACGGGGTAT

| | |
|---|---|
| Sequence 817 | cMhvSB094g05a2 |

TGGGCTTNTTCGTNGACCGTTTGCGCNCGGGCCTGAACCGCGACGCGCACCAGCTGCTGGGGGCC
GACCTGGNCATCAGNGCCGACCANCCCGTCNATGCNGNGTGGCGCGCCNAAGCGCACAAGCGCG
GTTTTATCCTGGCCGACACGGTGACGTTTCCCAGCATGGCGCAGGCGGGCGAGGGCGAGCAGTCG
CTGTCGCAGCTGGCGTCCCTCAAGGCCGTCTCGCCCGGCTACCCGCAGCGGGGCAAGCTGAAAAT
CACGACCAAACTGAACGAAGCGCAGGATGCCGTGGGCCANCCGACCAGCCAGGTACCGGCGCCC
GGCACCTTGTGGGTCGACGCGGCGATTTTGTCCANCCTGAACGCGAAACTGGGCGACACCTTGACC
TTGGGCGACAAGGCATTTACCGTCACGCAACTTGATCCCAGTGAGCCGGACCGGGGCCGCCTCGTT
CCTGAACTTCCCCC

| | |
|---|---|
| Sequence 818 | cMhvSB095b10a2 |

CCGCGGTGGCGGCCGANGTACCAACATGCTTTACCATGCTGCAAAATTTAGGATCCTGTGGCTGAA
ATATTTTGTAAGAAATGATGCATCCTGAATTTATCATTGAATTTCAAGTCTTGAAATAAGTAAATTC
ACATTTCCTTGTTTTGGCATAGAAGTGTTTAGCTGATTAAAGTTTTTGGCACTTGTTTTGCATTTCCT
CTGAGAGGGCACTAATGTATGAGAGAAGGTAAACCGAACCTTCTAAGGGAAAGGAAAGTTAAGG
AGGCAGGAAAAGCATCTATAGCTCTGTTTTCGGGATTTAAGAGTATAGGTTCTGGAGGCAGACTGC
TCAGCAGACTGGAGCCAGGTCCCAAGTCTGGCTTTGCCTGTCACTAGCTGTGTGAGCTCTGCCTTA
GTGAGTCTCAGCTTTCTCATCTGTCAAATGGAGGTGACGAGGGCTGTGGTGAGGA

| | |
|---|---|
| Sequence 819 | cMhvSB095c05a2 |

TGCTTGCTATCGCGCAACGTCTTGTCATGCTCGGAAGCCACATGCAACAGCCCGCCCTGCAAGGCC
GCTTCCATGGCGTCGAGCACCTTGAAAAACTGCTCCGTCGCTTCTTTCGAGACGGGCGCGAGCTCC
TGGCGCGGCTTGCGCAGTACAGGTGCAGGTCCAGGCTCGGCATGGGCCGCCGCGGCCTCTGGCGC
TGCCGCCTGCACGGGTGCCGGCNCGCTGGCCAACANGGCCGAAAATTGCTGCTGCAAGCTGTCGG
ACAAACTGNATTCAGGCAGGCGCGGCATGGCTTGCCACGCGCGTTTCATGGCATTCACNTTGAGGC
TGGCGGCGTCCTGCNCCTGCCATTCCGCCAGTGCGGTCTGGCGCGCGTCGAACACTGACT

| | |
|---|---|
| Sequence 820 | cMhvSB096g02a2 |

GTGTCCGGATGCTTCTACAGCACAGCGGAGCTCGATCGAAAGAGGGCAGTCGGGATCGTCCAGCC
TAACCATAACCGACTGGTCGGTGGCACGGTTCAGCTGAAGCTCCGCTGGCAGATCAGCATCTTGCT
GCTGGCCTTGGCCGATACGGCGTTGCATACCTTTCTGTTGGTACACCTGCAGGACGTGGTCGAGCA
GCTGGTGGCCATCGCTATCGGCCGGGAAGAGCTCCATGAAGCTCGTAGCGTCGACTTCGAACCGA
GGGTTGTCCTTGTTCTGTTCCTGCAGTCTGCGCTCGTAGTGGGCCTGCAGGCGGTCCAGTTCGCGCA
CTGCCCACGCGCAGGCGGAGGAAAGGCTAGTTTTGGGGCCAGTCACACCGCCTCCGGTATTCGGC
AAGTAGGTGCCAGGCGACTGGT

| | |
|---|---|
| Sequence 821 | cMhvSB097h05a2 |

CGAGGTACTTCCTGGCTTGTTGAGCGTGTCCTCACTGCTGGCCCTCTTGAGCCTGCTGAGTCGGGA
CTCAAAAGCCAAGGAAGTTGAAGACTTAGAACTCTTCATGCCGGAAGAGGCTGCAGGCAGAGGCC
GCACCCGGTCTGGGCCGTGGCCCCCTGCTCTGATGGATGGGTTCCAGGGCTTGGCTGCACTCCGCA
TGCTTGACTTCGTGGGTCTGTCTGCAAAAACTCTGCTTCTCCTGCTTCTCGGGAGCTGCCGACCTCA
ATCANCAAGTCANCCACTCTCCCGCGTACCTGCCCG

| | |
|---|---|
| Sequence 822 | cMhvSB101b10a2 |

GAGCTCCCCGCGGTGGCGGCCGCCCGGGCAGGTACGCGGGGACCTGCTGTGCTCTTGCTTGCACA
GTGTCCTGGAGCTGGACCTGGCTCTGGGTTTCCAGGAAGCAGTTTGACTAAAGGCAGCAAGCTGCT
TCCTCTGCTGCCTGAGATACCANATTCCCAATGGCNAANATTGANAAAAACGCTCCCACGATGGA
AAAAAAGCCANAACTGTTTAACATCATGGAAGTAGATGGAGTCCCTACGTTGATATTATCAAAAG
AATGGTGGGAAAAAGTATGTAATTTCCAAGCCAAGCCTGATGATCTTATTCTGGCAACTTACCCAA
AGTCAGGTACCT

| | |
|---|---|
| Sequence 823 | cMhvSB101e07a2 |

GGGCNAATTGGAGCTCCCCGCGGTGGCGGCCGANGTACACGNGGTNTAACCTGCTGNNNTCTTGN
TTGCACAGTGNCCNGGATCTGGACCTGGCTCTNGGTTGGGNGGANNCNNTCCGACTAANGGCACC
NTNCTGNTTNNTNTGNTGNCTNANNTNCCATATTCCNNNTGGNAAATATTGACAAAAACGCTCCCA
CGATGGAAAAAAAGCCAGAACTGTTTAACATCATGGAAGTAGATGGAGTCCCTACGTTGATATTA
TCAAAAGAATGGTGGGAAAAAGTCTGTAATTTCCAAGCCAAGCCTGATGATCTTATTCTGGCAACT
TACCCAAAGTCAGGTACCTGCCCG

| | |
|---|---|
| Sequence 824 | cMhvSB105f02a2 |

AGGTACGCGGGGACCTCACCTGCTGTGCTCTTGCTTGCACAGTGTCCTGGAGCTGGACCTGGCTCT
GGGTTTCCAGGAAGCAGTTTGACTAAAGGCAGCAAGCTGCTTCCTCTGCTGCCTGAAATACCAGAT
TCCCAATGGCGAAGATTGAGAAAAACGCTCCCACGATGGAAAAAAAGCCAGAACTGTTTAACATC
ATGGAAGTAGATGGAGTCCCTACGTTGATATTATCAAAAGAATGGTGGGAAAAAGTCTGTAATTT
CCAAGCCAAGCCTGATGATCTTATTCTGGCAACTTACCCAAAGTCAGGTACCTGCCCG

| | |
|---|---|
| Sequence 825 | cMhvSB105h07a2 |

AGGTACCTGACTTTGGGTAAGTTGCCAGAATAAGATCATCAGGCTTGGCTTGGAAATTACATACTT
TTTCCCACCATTCTTTTGATAATATCAACGTAGGGACTCCATCTACTTCCATGATGTTAAACAGTTC
TGGCTTTTTTTCCATCGTGGGAGCGTTTTTCTCAATCTTCGCCATTGGGAATCTGGTATCTCAGGCA
GCAGAGGAAGCAGCTTGCTGCCTTTAGTCAAACTGCTTCCTGGAAACCCAGAGCCAGGTCCAGCTC
CAGGACACTGTGCAAGCAAGAGCACAGCAGGTGACCCCGCGTACCTGCCCG

| | |
|---|---|
| Sequence 826 | cMhvSB027b01a2 |

CCCTTAGCGTGGTCGCGGCCGAGGTACCGCAGTATGGTTGGCCATGGGATTATCCTTCATTACATC
AAATGAGGTATGGTGGACAATCTTGTTTATAACATCACCTGACAAAGTTTTCTCCAAGAATTCCAA
CACCTTGTGGATCTCATGTTTTGGATTTTTTTTAATATCCCCGTAGAAGAGGTAGAGGATCCGGTGC
GTGTCTTTTGCAGCCCACCATCCTTTCACATGGTCAAACCAGGACCTGCCAACAACTTTTCCGGAC
ATGAATTTCTCATAAAATTCCTCTAAGTTCTGAGGATCAGGCATAAAGGAAGCCATCCTGTGAAAG
TGGTAGTAGGACACCAGGCAATCCTTGGGATTTCTGGCCACATAGACAATCTTGCAGTTTTCTTTC
CAGATAGATGGTGGAATCAGATGTGAAGGGAGATGTGTTTT

| | |
|---|---|
| Sequence 827 | cMhvSB027g10a2 |

GGTACCGCAGTATGGTTGGCCATGGGATTATCCTTCATTACATCAAATGAGGTATGGTGGACAATC
TTGTTTATAACATCACCTGACCAAGTTTTCTCCAAGAATTCCAACACCTTGTGGATCTCATGTTTTG
GATTTTTTTTAATATCCTCGTAGAAGAGGTAGAGGATCCGGTGCATGTCTTTTGCAGCCCACCATCC
TTTCACATGGTCAAACCAGGACCCGCCAACAACTTTTCCGGACATGAATTTCTCATAAAATTCCTC
TAAGTTCTGAGGATCAGGCATAAAGGAAGCCATCCTGTGAAAGTGGTAGTAGGACACCAGGCAAT
CCTTGGGATTTCTGGCCACATAGACAATCTTGCAGTTTTCTTTCCAGATAGATGGTGGAATCAGAT
GTGAAGGGAGATG

| | |
|---|---|
| Sequence 828 | cMhvSB031h02a2 |

CCCTTAGCGTGGTCGCGGCCGAGGTACCGCAGTATGGTTGGCCATGGGATTATCCTTCATTACATC
AAATGAGGTATGGTGGACAATCTTGTTTATAACATCACCTGACCAAGTTTTCTCCAAGAATTCCAA
CACCTTGTGGATCTCATGTTTTGGATTTTTTTTAATATCCTCGTAGAAGAGGTAGAGGATCCGGTGC
ATGTCTTTTGCAGCCCACCATCCTTTCACATGGTCAAACCAGGACCCGCCAACAACTTTTCCGGAC
ATGAATTTCTCATAAAATTCCTCTAAGTTCTGAGGATCAGGCATAAAGGAAGCCATCCTGTGAAAG
TGGTAGTAGGACACCAGGCAATCCTTGGGATTTCTGGCCACATAGACAATCTTGCAGTTTTCTT

| | |
|---|---|
| Sequence 829 | cMhvSB038f11a2 |

CGGCCGCCCGGGCAGGTACCGCAGTATGGTTGGCCATGGGATTATCCTTCATTACATCAAATGAGG
TATGGTGGACAATCTTGTTTATAACATCACCTGACCAAGTTTTCTCCAAGAATTCCAACACCTTGTG
GATCTCATGTTTTGGATTTTTTTTAATATCCTCGTAGAAGAGGTAGAGGATCCGGTGCATGTCTTTT
GCAGCCCACCATCCTTTCACATGGTCAAACCAGGACCCGCCAACAACTTTTCCGGACATGAATTTC
TCATAAAATTCCTCTAAGTTCTGAGGATCAGGCATAAAGGAAGCCATCC

| | |
|---|---|
| Sequence 830 | cMhvSB065c08a2 |

CGCCCGGGCAGGTACCGCAGTATGGTTGGCCATGGGATTATCCTTCATTACATCAAATGAGGTATG
GTGGACAATCTTGTTTATAACATCACCTGACCAAGTTTTCTCCAAGAATTCCAACACCTTGTGGATC
TCATGTTTTGGATTTTTTTTAATATCCTCGTAGAAGAGGTAGAGGATCCGGTGCATGTCTTTTGCAG
CCCACCATCCTTTCACATGGTCAAACCAGGACCCGCCAACAACTTTTCCGGACATGAATCTCTCAT
AAAATTCCTCTAAGTTCTGAGGATCAGGCATAAAGGAAGCCATCCTGTGAAAGTGGTAGTAGGAC
ACCAGGCAATCCTTGGGATTTCTGGCCACATAGACAATCTTGCAG

| | |
|---|---|
| Sequence 831 | cMhvSB071c02a2 |

NNATTGGAGCTCCACCGCGGTGGCCGAGCGGCCGCCCGGGCAGGTACGCGGGTAGACACGCTTTC
CTTGAACTGAAATTTTCCCCATAAAGAAAAACCAGATTTGGAGTTCGTTCTTGAAATGTCCTCACC
ACAACTGATAAAAACACATCTCCCTTCACATCTGATTCCACCATCTATCTGGAAAGAAAACTGCAA
GATCGTCTATGTGGCCAGAAATCCCAAGGATTGCCTGGTGTCCTACTACCACTTTCACAGGATGGC
TTCCTTTATGCCTGATCCTCAGAACTTAGAGGAATTTTATGAGAAATTCATGTCCGGAAAAGTTGTT
GGCGGGTCCTGGTTTGACCATGTGAAAGGATGGTGGGCTGCAAAAGACA

| | |
|---|---|
| Sequence 832 | cMhvSB073d08a2 |

TGATTGGAGCTCCCCGCGGTGGCCGAGCGGCCGCCCGGGCAGGTACAACATGGATGCATGAAATT
TTAGACATGATTCTAAATGATGGTGATGTGGAGAAATGCAAAAGAGCCCAGACTCTAGATAGACA
CGCTTTCCTTGAACTGAAATTTCCCCATAAAGAAAAACCAGATTTGGAGTTCGTTCTTGAAATGTC
CTCACCACAACTGATAAAAACACATCTCCCTTCACATCTGATTCCACCATCTATCTGGAAAGAA

| | |
|---|---|
| Sequence 833 | cMhvSB082e04a2 |

ACCGCAGTATGGTTGGCCATGGGATTATCCTTCATTACATCAAATGAGGTATGGTGGACAATCTTG
TTTATAACATCACCTGACCAAGTTTTCTCCAAGAATTCCAACACCTTGTGGATCTCATGTTTTGGAT
TTTTTTAATATCCTCGTAGAAGAGGTAGAGGATCCGGTGCATGTCTTTTGCAGCCCACCATCCTTTC
ACATGGTCAAACCAGGACCCGCCAACAACTTTTCCGGACATGAATTTCTCATAAAATTCCTCTAAG
TTCTGAGGATCAGGCATAAAGGAAGCCATCCTGTGAAAGTGGTAGTAGGACACCAGGCAATCCTT
GGGATTTCTGGCCACATAGACAATCTTGCAGTTTTCTTTCCAGATAGATGGTGGAATCAGATGTGA
AGGGAGATGTGTTTTTATCAGTTGTGGTGAGGACATTTCAAGAACGAACTCCAAATCTGGTTTTTC
TTTATGGGGAAATTTCAGTTCAAGGAAAACGTGTCTATCTANAAGTCTGGGCTCTTTTGCATTTCTC
CACATCACCATCATTTAGAATCATGTCTAAAATTTCATGCATCCATGTTGTACCTCGGCCCGCTCTA
NAAACTAGNGGGATC

| | |
|---|---|
| Sequence 834 | cMhvSB082g02a2 |

AGGTACAACATGGATGCATGAAATTNTANACNTGATTCTAAATGATGGTGATGTGGANAAATGCN
AAAGAGCCCAGACTCTAGATAGACACGCTTTCCTTGAACTGAANTTTCCCCATAACAGAAAAACC
AGATTTGGAGTTCGTTCTTGAAATGTCCTCACCACAACTGATAAAAACACATCTCCCTTCACATCT
GATTCCACCATCTATCTGGAAAGAAAACTGCAAGATTGTCTATGTGGCCAGAAATCCCAAGGATTG
CCTGGTGTCCTACTACCACTTTCACAGGATGGCTTCCTTTATGCCTGATCCTCAGAACTTAGAGGAA
TTTTATGAGAAATTCATGTCCGGAAAAGTTGTTGGCGGGTCCTGGTTTGACCATGTGAAGGGATGG
TGGGGCTGCAAAAAGACATGCACCGGATCCTCTTACCTCTTCTACGAGGGATATTAAAAAAAATCC
CAAAAACCATGAGATCCCCAAAGGTGGTTGGAATTCTTGG

| | |
|---|---|
| Sequence 835 | cMhvSB092b01a2 |

CCGGGCAGGTACCGCAGTATGGTTGGCCATGGGATTATCCTTCATTACATCAAATGAGGTATGGTG
GACAATCTTGTTTATAACATCACCTGACCAAGTTTTCTCCAAGAATTCCAACACCTTGTGGATCTCA
TGTTTTGGATTTTTTTTAATATCCTCGTANAAGAGGTAGAGGATCCGGTGCATGTCTTTTGCAGCCC
ACCATCCTTTCACATGGTCAAACCAGGACCCGCCAACAACTTTTCCGGACATGAATTTCTCATAAA
ATTCCTCTAAGTTCTGAGGATCTGGCATAAAGGAAGCCATCCTGTGAAAGTGGTAGTAGGACACC
AGGCAATCCTTGGGATTTCTGGCCACATAGACAATCTTGCAGTTTTCTTTCCAGATAGATGGTGGA
ATCAGATGTGAAGGGAGATGTGTTTTTATCAGTTGTGGTGAGGACATTTCAAGAACGAACTCCAAA
TCTGGTTTTTCTTTATGGGGAAATTTCAGTTCAAGGAAAGCGTGTCTATCTAGAGTCTGGGCTCTTT
TGCATTTCTCCCATCACCATCATTTAAAATCATGTCTAAAATTTCATGCATCCATGTTGTACCTCGC
CGTCTAGAACTAGTGGATCCCCGGGCTGCAGGAATTCNAT

| | |
|---|---|
| Sequence 836 | cMhvSB092d06a2 |

AGGTACAACATGGATGCATGAAATTTTAGACATGATTCTAAATGATGGTGATGTGGAGAAATGCA
AAAGAGCCCAGACTCTAGATAGACACGCTTTCCTTGAACTGAAATTTCCCCATAAAGAAAAACCA
GATTTGGAGTTCGTTCTTGAAATGTCCTCACCACAACTGATAAAAACACATCTCCCTTCACATCTG
ATTCCACCATCTATCTGGAAAGAAAACTGCAAGATTGTCTATGTGGCCAGAAATCCCAAGGATTGC
CTGGTGTCCTACTACCACTTTCACAGGATGGCTTCCTTTATGCCTGATCCTCAGAACTTAGAGGAAT
TTTATGAGAAATTCATGTCCGGAAAAGTTGTTGGCGGGTCCTGGTTTGACCATGTGAAAGGATGGT
GGGCTGCAAAAGACATGCACCGGATCCTCTACCTCTTCTACGAGGATATTAAAAAAAATCCAAAA
CATGAGATCCACAAGGTGTTGGAATTCTTGGANAAAACTTGGTCAGGTGATGTTATAAACAAAGA
TTGTCCACCATACCTCA

| | |
|---|---|
| Sequence 837 | cMhvSB093f05a2 |

GATTGGAGCTCCCCGCGGTGGCGGCCGCCCGGGCAGGTACAACATGGATGCATGAAATTTTAGAC
ATGATTCTAAATGATGGTGATGTGGAGAAATGCAAAAGAGCCCAGACTCTAGATAGACACGCTTT
CCTTGAACTGAAATTTCCCCATAAAGAAAAACCAGATTTGGAGTTCGTTCTTGAAATGTCCTCACC
ACAACTGATAAAAACACATCTCCCTTCACATCTGATTCCACCATCTATCTGGAAAGAAAACTGCAA
GATTGTCTATGTGGCCAGAAATCCCAAGGATTGCCTGGTGTCCTACTACCACTTTCACAGGATGGC
TTCCTTTATGCCTGATCCTCAGAACTTAGAGGAATTTTATGAGAAATTCATGTCCGGAAAAGTTGTT
GGCGGGTCCTGGTTTGACCAT

| | |
|---|---|
| Sequence 838 | cMhvSB093f12a2 |

CGGGCAGGTACAACATGGATGCATGAAATTTTAGACATGATTCTAAATGATGGTGATGTGGAGAA
ATGCAAAAGAGCCCAGACTCTAGATAGACACGCTTTCCTTGAACTGAAATTTCCCCATAAAGAAA
AACCAGATTTGGAGTTCGTTCTTGAAATGTCCTCACCACAACTGATAAAAACACATCTCCCTTCAC
ATCTGATTCCACCATCTATCTGGAAAGAAAACTGCAAGATTGTCTATGTGGCCAGAAATCCCAAGG
ATTGCCTGGTGTCCTACTACCACTTTCACAGGATGGCTTNCTTTATGCCTGATCCTCAGAACTTAGA
GGAATTTTATGAGAAATTCATGTCCGGAAAAGTTGTTGGCGGGTCCTGGTTTGACCATGTGAAAGG
ATGGTGGGCTGCAAAAGACATGCACCGG

| | |
|---|---|
| Sequence 839 | cMhvSB026g10a2 |

CCCTTTCNAGCGGCCGCCCGGGCNGGTACTGANCTCCACAAACGTGGCCATGGTTGGTGCGGAAA
TGATTCTGANTGAGCAGGTAAAAGNCTCACGTNCTGCTGTGTCCANAGTTGGTTCCTTCCANAGGG
TTCGTGGTCTNGCTGGCTTCAAGAATGAAGCCGTGGACCTTCACAGTGTGTGTNACANCTGTTAAA
GATGTNGTGTCTGGANTNACGTTCCTTCACATGTGTCTGGA

| | |
|---|---|
| Sequence 840 | cMhvSB027c01a2 |

ACGCGGGGAGGAGAGATCAAACAGAACTGCTGCTGGGTGGTTGTCAGGAGCTGCTACACGGAGA
ACCCTGGACTATTCGATCAAGCAGCAAGGCTATATGTTCACTTATGCAGAAATGGACCATTGCAGA
TGCTAATCTTTGTTGTGCAAGCGAAGGCTCACTTGGAAGGAAATACTCAGCCCCTCTCTGGGCAGC
ATTTGAGTTCCTTATGGATACCGAGTCGCGAAACAAGTTATTTTTTTTAATGTATCCTTCTTTATGA
GGAGAATGCTACCCAAAAATGTATTAAAGGAATATTAAGTCGTCCAGAGACTGTCTTGCTACCAA
GAACTGTGCAATGGAATTCTTTTT

| | |
|---|---|
| Sequence 841 | cMhvSB028a04a2 |

ACCTCAGTTGGAAATGCAGAAATCACCCATCTTCTACATCGATCTTGCTGGGAGCTGCAGACCAGA
GCTGTTCCTATTTGGCTATCTTGGAAGCAACCTCAGGTATTTCTTTATTAGCAGTGTGAGAACAGAC
TAATACAGATTACTAAATCCAGAATCCAGAGAACACAAGATTATAAGTTCCTTGCGCTTGAGCATG
TTCAGTGAGAGCGCTGCAGGGAGAAGGATGATGCATTCTGAGAGCCAACAGGGCTGGACTGGAAA
CTGGAGGAAGAGAAAGAGCTAAGGAAGGAGAGGAGCAAATTGG

| | |
|---|---|
| Sequence 842 | cMhvSB029g05a2 |

CCCTTAGCGTGGTCGCGGCCGAGGTACCTGACTTNGGGTANGTNGCCATANTANGANCATNANGC
NTGGNTNGGAAANTACATACTTTTTCCCACCATTCTTTTGATAANATCAACNTATGGACTNCNTCT
ACTTNCATGATNTNAAACANTANTGGNTTTTTTTNCNTNGNGGGAGCGTNTTTCTCANTCTTNACN
ATTGGGAATCAGATGGGCTTTTGGCTTATCTCTCCCTGTGTGAGCCATTAAAGGGGATAATAAGGA
TCATTGCTTATATTCTCTGTGAATTTATAATTAATGAAAAAGGATT

| | |
|---|---|
| Sequence 843 | cMhvSB031g06a2 |

CCCTTAGCGTGGTCGCGGCCGAGGTACGCGGGCTTTNAAGAAGTCCTTGTTGGAATTTTCCTNAGC
TAGATTTCAAGCCATGTCAGGACACCACTCTCATTATATTACCATAATNGNTTTTTCTTTNTTTTTTT
TTNAAATTTNANTTTTTTAAAATTCCNGGATNCATGNNCNGNANNNNCCNTATTTTTTTTAANGTC
AAATCCNNCNTTANTNTCCNNGTNGATNACAAATATAACCCNGAGGNAATTTTTTTTTTTTTTTTTT

| | |
|---|---|
| Sequence 844 | cMhvSB044b07a2 |

AGGTACTGTGGGTTCTGAGTCAAGGATCCCAGTGCTGCCAGGAACCAGCAGTCAGCTGCGCCTCCT
TGTTGGATGTCAAATCTGCTTATATCATCCAGGATGAAGTGAGGAGGACCCCCTGGTAGATCCTGT
GGCCGCTTCCATATCACATTGGAGAGGCGTTTTTCCTGGAGCAGCTTCTGGCCTATGGAAGAATCT
GCTGCAGGGAATGTCTCATCCTTAAACGTCCGGCCCATGCTCAGGCAGTGATCCCGCAAGGTGGTA
AAGTCCTGGTCTTTGAACTTGATGATGGAGGTCTCCACTGAAGGCTCCTGGTAATACGCCATGACT
CTCCTTAGAA

| | |
|---|---|
| Sequence 845 | cMhvSB044f11a2 |

TNAGGGCGAATTGGAGCTCCCCGCGGTGGCGGCCGCCCGGGCAGGTACTGATCATAGTTGATCAC
AATTGGAGGGGGAAGGGCTGTGGCTTCTCAAATCAAAGGAGGCTGGTGGGTTAAAATCATCAACA
GCATTTCATGGTCTTAAGTTCACTTCTCATCAAAGGATCCCTGTGGTGTTGTGTTTGATCTTGAACT
TGCTTTGCTGTTTTAGTCTTTTCCATCAAGTGAAAAAACTACTTTGATGACATCCTTTCATCCTTTTC
ATTCTTCCAGCAGTATTTGGTATCTTTTTACACTAGGCTTGCAGGCCAGGGAATCTGCATGCCAGTC
TCCACTTGCTGAACAGCAGTTTTCTTTTGATCATATTCGGTTTTAGGACACTTGAGGC

| | |
|---|---|
| Sequence 846 | cMhvSB049c12a2 |

AGGTACTGTGGGTTCTGAGTCAAGGATCCCAGTGCTGCCAGGAACCAGCAGTCAGCTGCGCCTCCT
TGTTGGATGTCAAATCTGCTTATATCATCCAGGATGAAGTGAGGAGGACCCCCTGGTAGATCCTGT
GGCCGCTTCCATATCACATTGGAGAGGCGTTTTTCCTGGAGCAGCTTCTGGCCTATGGAAGAATCT
GCTGCAGGGAATGTCTCATCCTTAAACGTCCGGCCCATGCTCAGGCAGTGATCCCGCAAGGTGGTA
AAGTCCTGGTCTTTGAACTTGATGATGGAGGTCTCCACTGAAGGCTCCTGGTAATACGCCATGACT
CTCCTTAGAAGACTTC

| | |
|---|---|
| Sequence 847 | cMhvSB049e07a2 |

CCGGGCAGGTACGCGGGGAAAGTGTGTAGCACCTCCACCTTCTCTCTCTCTCTCCCTCTCCCTCTCC
TGCCAGCCAAGTGAAGACATGCTTACTTCCCCTTCACCTTCCTTCATGATGTTACCATTGGAATGAC
ATACTGCATCCTATAGTTATACCATCCACTCTGAAATCAATGTGAATTTAACTTCAGTTCCATACAG
AAACTTCTTTTCCACAGGTAAGAAACGGTTGAACTGGATGCAATTTTTATCACAGCTTGTGTAAGA
CTGCCTCTGTCCCTCCTCTCACATGCCATTGGTTAACCAGCAGACAGTGTGCTCGGGGGCGTTGCC
AGCTCATTGCTCTTATA

| | |
|---|---|
| Sequence 848 | cMhvSB049h11a2 |

AGGTACTGTGGGTTCTGAGTCAAGGATCCCAGTGCTGCCAGGAACCAGCAGTCAGCTGCGCCTCCT
TGTTGGATGTCAAATCTGCTTATATCATCCAGGATGAAGTGAGGAGGACCCCCTGGTAGATCCTGT
GGCCGCTTCCATATCACATTGGAGAGGCGTTTTTCCTGGAGCAGCTTCTGGCCTATGGAAGAATCT
GCTGCAGGGAATGTCTCATCCTTAAACGTCCGGCCCATGCTCAGGCAGTGATCCCGCAAGGTGGTA
AAGTCCTGGTCTTTGAACTTGATGATGGAGGTCTCCACTGAAGGCTCCTGGTAATACGCCATGACT
CTCCTTAGAAGACTTCCGAGGT

| | |
|---|---|
| Sequence 849 | cMhvSB063a08a2 |

ATTGGAGCTCCCCGCGGTGGCGGCCCGAGGTACTGTGGGTTCTGAGTCAAGGATCCCAGTGCTGCC
AGGAACCAGCAGTCAGCTGCGCCTCCTTGTTGGATGTCAAATCTGCTTATATCATCCAGGATGAAG
TGAGGAGGACCCCCTGGTAGATCCTGTGGCCGCTTCCATATCACATTGGAGAGGCGTTTTTCCTGG
AGCAGCTTCTGGCCTATGGAAGAATCTGCTGCAGGGAATGTCTCATCCTTAAACGTCCGGCCCATG
CTCAGGCAGTGATCCCGCAAGGTGGTAAAGTCCTGGTCTTTGAACTTGATGATGGAGGTCTCCACT
GAAGGCTCCTGGTAATACCCCATGACTCTCCTTAGAAGACTTCCGAGGTCCTTTCCTGTTTCCTANG
CAGGTGTGTCTGATGGAGGAGGGGAGACCGGCAGGT

| | |
|---|---|
| Sequence 850 | cMhvSB063f02a2 |

NTCCTTTTTTTTTTTAATTTTTAAATCAGCTTTCCTAGCTNGAAGNGTTNCTAGTNTTGAATGGTGG
GATGTAGTCAAGGAGGTNTTTGTTCAAGGTTGGANATGANCAGCTTTTATAATAATTCCAGGTTTG
GGATATATCAGNGAAATTTCATTTTTCATTTTCTACTAACAGNGCCANATNGGCCTCACTTTTTGGA
CTGGATCAGGCAGCTGCTGGCCATGGAAATGAATTTTTCCAGTACACAGCCCCA

| | |
|---|---|
| Sequence 851 | cMhvSB071c10a2 |

ACGCGGGGATGAGATCTGGTTGTTTGAAAGTGTGTAGCACCTCCACCTTCTCTCTCTCCCTCCCTCT
CCCTCTCCTGCCAGCCAAGTGAAGACATGCTTACTTCCCCTTCACCTTCCTTCATGATGTTACCATT
GGAATGACATACTGCATCCTATAGTTATACCATCCACTCTGAAATCAATGTGACTTTAACTTCAGTT
CCATACAGAAACTTCTTTTCCACGGGTAAGAAACGGTTGAACTGGATGCAATTTTTATCACAGCTT
GTGTAAGACTGCCTCTGTCCCTCCTCTCACATGCCATTGGTTAACCAGCAGACAGTGTGCTCAGGG

| | |
|---|---|
| Sequence 852 | cMhvSB071g06a2 |

CTNATTGGAGCTCCACCGCGGTGGCCTACCGGAACTGAATCTGCCTTCCAAGTTACACGGATAAGA
ATTATGGTTCGACGTGGTGGCATCGGTGCCCAGTGTGGGTTGGTGTTTGCCTATAACTCATCTTCAG
ATAAATTTTGTGCAGGAAGAACACTTCAAAAGGTTTGAAAAATATGACAAATGGAAGCTTCAGGA
GCTCAGGCAATTTGTAAAAAGCAGGTAAGAAGGTAAAAAATCTTTGTAGAACAAAGATCTACAGA
ACAAAAATCTTTGTAGTTAATAAGAATGTATTCATGCTCATTGGTGAACTGTGCTTGCTTGTCTTTA
TAGAAAAGGCGCCACTAATCCATCTCAGTGGCCATAAGCCTTCATT

| | |
|---|---|
| Sequence 853 | cMhvSB073b07a2 |

ATGTACACCNGGTNANNANCNTGGCCTGNGGCNGTANGNNCTCATGNTCATCTNTNNNTGGAAAN
NCCTAGGGNGGCNCAGGGNCAACANTTTNNNACANNANCTGANGGTNAAACGGCCTNTNGCNGA
CTTAANNCTCATGCCTGTNAATTGGAAATACAAAGACCTCCAAAAAAGGACCAGTTCCTCGGATG
TGCCCCCTCACAGAGAGATGAAGGGGCAGCAGAAAACAGCTGAAACGGAAGAGGGGACAGTGCA
GATTCAGGAAGGTGCAGTGGCTACTGGGGAAGACCCAACCAGTGTGGCTATTGCCAGCATCCANT
CAGCTGCCACCTTCCTGACCCCAACGTCAAGTGATGTACCTGCCCGGGCGGCCGCTCG

| | |
|---|---|
| Sequence 854 | cMhvSB073b11a2 |

AGCTCCCCGCGGTGGCGGCCGAGGTACTGTCGTTGGGTTGCACCCAAGGCACTTGGGCCCACCTGC
CTTCCCACACACTCACTATCCAGAAAAGAGGAAAAGCCTAAAGATGACACACCTTCCTCCCTACTC
AGGCCTCCTCGGCGATGGCTTTGATTGTCTTGTGTTTTTTATAGGGGCCAAAGAGCAGTTGATTTTT
TTTCAAAGTCTAGTATTTCTCTGAAGATTCTACATCTCTACACAAGATATTCATTCTTTTGGTCACC
TAGGGATCTTCTAAGTGTGATATTACTTTCAGAGAATTCAGACAAGTGAGAAACAATAATGTAGG
AGTCAGCAAAG

| | |
|---|---|
| Sequence 855 | cMhvSB075c01a2 |

CTGATTGGAGCTCCCCGCGGTGGCGGCCCGAGGTACGCGGGGAGACTCTGCCTTTTCAACATGGAT
GGCTCCTCCCGCTGCCGCTGCCGCTCCAGGAGACAGCATTACAGAGCATCAGTTAGGTGCAGAGA
CTGGGCAGTGCGCCCGTGTGCAAAGACAGGAGACACGAATCTTCCCTGAAGGAGTGACAGTCTAG
GGAGGAAGGCAGACTGCAGGGGACCTACTTCTCTCGGGAATCTCAATACTTGGAACAAGAACCTC
CTAGACGGACCCTTTGGCATAATGAATTGGACCAACTGTAGGTTCCAGGACTAGAGAGCCAGCAA
TGCCTCCATGAACAATCTCACCCAATTACTCTGCTCAGGAAACGAGGTAACTGATGGACAGCCGA
GGCAGCCCCTT

| | |
|---|---|
| Sequence 856 | cMhvSB075e02a2 |

CGAGGTACTGTGGGTTCTGAGTCAAGGATCCCAGTGCTGCCAGGAACCAGCAGTCAGCTGCGCCT
CCTTGTTGGATGTCAAATCTGCTTATATCATCCAGGATGAAGTGAGGAGGACCCCCTGGTAGATCC
TGTGGCCGCTTCCATATCACATTGGAGAGGCGTTTTTCCTGGAGCAGCTTCTGGCCTATGGAAGAA
TCTGCTGCAGGGAATGTCTCATCCTTAAACGTCCGGCCCATGCTCAGGCAGTGATCCCGCAAGGTG
GTAAAGTCCTGGTCTTTGAACTTGATGATGGAGGTCTCCACTGAAGGCTCCTGGTAATACGCCATG
ACTCTCCTTAAAAGACTTCCGAGGTCCT

| | |
|---|---|
| Sequence 857 | cMhvSB079a10a2 |

CCGGGCAGGTACAGGACACAATCCCTGCTTCATTCTTGGCTGACACAGTATACCACCCAGCATCTT
CTTTTGTGGCTCCCTGAATGAGCAGGCAGATGTAGCCGTGGTTGTCCTGGTGCATGCTGGAGAAAA
GGATAAAGTCATTAGGGTTCTAAATTTTTTAAAAGTGGCTTTGGACATGAAGCATCATTTTTAATT
AGATCATTAGAAACAGAATTGTGCAAGTAGCTGATAATAGGGTCATACTTATTCTGTAGAGATTAC
TAGCTCCATTAAAGTTAATGGGAGAAAGAACAGACGTCAAGAGTTGAATACATCTGTGTGCTTAA
TTCCTAGTTGAGGATCTGCCTTTACAAAAACCACTGAATAGTCTTTTATCACTAAAGCAAATGAAT
TCATCTTTTCTTTTAGATAGAATGATAAACA

| | |
|---|---|
| Sequence 858 | cMhvSB079c06a2 |

TTNTNNCANTCTNATCAGATACNTGGCCGACCTCCNAGGGGGGGCCCGGGNACCGNGACTNTTGT
CNCATTNAGTGAGGNNCAATCNGGAGGCTTGGCCGTANNTNTGGACCATATCTGGTTCTCNTGCTC
CATGAGAAAAGTTTTAGAGACAGTCTTTGATGAAGTCATCATGGTAGATGTCTTGGACAGTGGCGA
TTCTGCTCATCTAACCTTAATGAAGAGGCCAGAGTTGGGTGTCACGCTGACAAAGCTCCACTGCTG
GTCGCTTACACAGTATTCAAAATGTGTATTCATGGATGCAGATACTCTGGTCCTA

| | |
|---|---|
| Sequence 859 | cMhvSB080a05a2 |

ACGCGGGGAGACTCTGCCTTTTCAACATGGATGGCTCCTCCCGCTGCCGCTGCCGCTCCAGGAGAC
AGCATTACAGAGCATCAGTTAGGTGCAGAGACTGGGCAGTGCGCCCGTGTGCAAAGACAGGAGAC
ACGAATCTTCCCTGAAGGAGTGACAGTCTAGGGAGGAAGGCAGACTGCAGGGGACCTACTTCTCT
CGGGAATCTCAATACTTGGAACAAGAACCTCCTAGACGGACCCTTTGGCATAATGAATTGGACCA
ACTGTAGGTTCCAGGACTAGAGAGCCAGCAATGCCTCCATGAACAATCTCACCCAATTACTCTGCT
CAGGAAACGA

| | |
|---|---|
| Sequence 860 | cMhvSB080g07a2 |

CNAATTGGAGCTCCCCGCGGTGGCGGCCGAGGTACTGTGGGTTCTGAGTCAAGGATCCCAGTGCT
GCCAGGAACCAGCAGTCAGCTGCGCCTCCTTGTTGGATGTCAAATCTGCTTATATCATCCAGGATG
AAGTGAGGAGGACCCCCTGGTAGATCCTGTGGCCGCTTCCATATCACATTGGAGAGGCGTTTTTCC
TGGAGCAGCTTCTGGCCTATGGAAGAATCTGCTGCAGGGAATGTCTCATCCTTAAACGTCCGGCCC
ATGCTCAGGCAGTGATCCCGCAAGGTGGTAAAGTCCTGGTCTTTGAACTTGATGATGGAGGTCTCC
ACTGAAGGCTCCTGGTAATACGCCATGACTCTCCTTAGAAGACTTCCGAGGTCCT

| | |
|---|---|
| Sequence 861 | cMhvSB082a03a2 |

NCNNGCNTNGTCCTATATCNAATATACCCATTGCGGGCCNNGCCNCTNGGAGGNCTNTTCTCANNT
NANNNNATCATNCGNTGANGGTGGCNTTAGATCCNAANTATCNCCCCNTTGACTGTGCNTATNNN
TNTNAGANNCTGCANCAAGCGGGATAANCCNTTNATNATAATATCCNNNATAAGGNTGNGATNCT
NNAGNNNCTGTGCNTCTGNTGGNNAGTAGTGANCTCTTTCTTTACCAGACCCCTNGTGGACGAAN
GCTTTTATACAAGACCCTCCTGGACCNTGCAGCTATACNNTATGNACCTGNATCNNNTNCCCTGNC
CNNNNNGNTNCCTGACNGGGGATGACTTTTTCCCCAAAGATGATAAAGGTAATATGATCAGTGGA
AAAGGAACGTTCTTGGATGCCTGGGAGGCCATGGAGGAGCTGGTGGACGAGGGGCTGGTGAAAG
CCCTTGGGGTCTCAAATTTCAACCACTTCCAGATCGAGAGGCTCTTGAACAAACCTGGACTGGAAA
TATAAACCAGTGACTAACCAGGTTTGAGTGTCACCCATACCTCACGCCAGGANAAACTGATCCAGT
CCTCGGCCCGTCTTAAAACTAGTGGATCCCCCCGGCTTGCAGGAAATTCGATTTCAAAGCTTATCG
ATNCCCGNCNACCTCNANGGGG

| | |
|---|---|
| Sequence 862 | cMhvSB082e03a2 |

GCCATGCTCTCCTCCTCTGCCAGTCTCCTCCACCACTCTCTAACCTGAGAGCCTGTGGAACCTGCCC
GTCTCCCCTCCTCCATCAGACACACCTGCCTAGGAAACAGGAAAGGACCTCGGAAGTCTTCTAAGG
AGAGTCATGGCGTATTACCAGGAGCCTTCAGTGGAGACCTCCATCATCAAGTTCAAAGACCAGGA
CTTTACCACCTTGCGGGATCACTGCCTGAGCATGGGCCGGACGTTTAAGGATGAGACATTCCCTGC
AGCAGATTCTTCCATAGGCCAGAAGCTGCTCCAGGAAAAACGCCTCTCCAATGTGATATGGAAGC
GGCCACAGGATCTACCAGGGGGTCCTCCTCACTTCATCCTGGATGATATAAGCAGATTTGACATCC
AACAAGGAGGCGCAGCTGACTGCTGGTTCCTGGCAGCACTGGGATCCTTGACTCANAACCCACAG
TACCT

| | |
|---|---|
| Sequence 863 | cMhvSB083d09a2 |

CCGGGCAGGTACCTGAAAAACAGCTGGTAGGATGGAGGAACTGAGCTTTTAAATAGGCAAATGTG
GCTAGGAGCTACCATACTGGACAGCACAGTGTATTAGTTTGGTGCAAAAGTAATTGTGGTTTTGGC
CATTTTTAAGTGGATTGGTAAGCCTGGCTATTTAAAGTGTGGTCCACAGAGCAGGAGAATCACTGC
ACCTGAGAGCTGGTGGAAATGTAGATCTCTGACGTTAGCATAGGCTTCCTAAATCAGAAACTGCAT
TCTAACAAGATCTCCTGGTGCTTCTCATGCACAGTAAAGTTTAGAAAGTTAGGAGATGCATACAAG
TGGTTCTCATCCTGACAGCACTTCAGACACAACTGAGAAACATTAAAAGAAGCTGAGCCTAGGTC
ACACCCTCCACCCAGAGATTCTTAGGTTAATGGTTTAAAGGCTTGGCCTGAACATGAAGAGTTTTA
AAAGCACTCTGGGGGATTCTAATAAAAATTCGAGAACCATCCCAGCATAAGTCAGTCCT

| | |
|---|---|
| Sequence 864 | cMhvSB090g05a2 |

NAATTGGAGCTCCCCGCGGTGGCGGCCGAGGTACTGTGGGTTCTGAGTCAAGGATCCCAGTGCTG
CCAGGAACCAGCAGTCAGCTGCGCCTCCTTGTTGGATGTCAAATCTGCTTATATCATCCAGGATGA
AGTGAGGAGGACCCCCTGGTAGATCCTGTGGCCGCTTCCATATCACATTGGAGAGGCGTTTTTCCT
GGAGCAGCTTCTGGCCTATGGAAGAATCTGCTGCAGGGAATGTCTCATCCTTAAACGTCCGGCCCA
TGCTCAGGCAGTGATCCCGCAAGGTGGTAAAGTCCTGGTCTTTGAACTTGATGATGGAGGTCTCCA
CTGAAGGCTCCTGGTAATACGCCATGACCCTCCTTAGAAGACTTCCGAGGTCCTTTCCTGTTTC

| | |
|---|---|
| Sequence 865 | cMhvSB090h07a2 |

NATTGGAGCTCCCCGCGGTGGCGGCCGCCCGGGCAGGTACCTGACTGTGGCTCAGATCTGCGTCGC
AGCAGCGAGAGAAGAAATCACTCCATATCCGATGAGAGGAAGAGTGGCACAGAGATGGTGTCTA
CAATTAGAGACATTTCTGACTCCACCTTAGCCTAAGCAAACTTTATATACTGAGTAACATTTGAAG
GTTGTCTTTTAATGGTGGGGGGTGTTTTTTTCCTTTTTAAACTACAGTGCTTGCACAAGAGAGGGAG
GGACTCANAAAAGGTTAGGGCAGGTGAGGGAGACAGTAGATGGCCTGGGATGACTTGAGTCCATC
ATACTATTGCTTTGGCGGGTGTCCTCCCCCATGTTTGATTCAAATTCCATGAGTGACCTACCTTTCC
CCAGGAATGGGACTGANAGGGTAAGTCTCCACAACTCAGTCTGCACAGGGCTCCCCGTTCAGGCT
GCCTT

| | |
|---|---|
| Sequence 866 | cMhvSB091d11a2 |

AGCTCCACCGCGGTGGCGGCCGGCCATGCTCTCCTCCTCTGCCAGTCTCCTCCACCACTCTCTAACC
TGAGAGCCTGTGGAACCTGCCCGTCTCCCCTCCTCCATCAGACACACCTGCCTAGGAAACAGGAAA
GGACCTCGGAAGTCTTCTAAGGAGAGTCATGGCGTATTACCAGGAGCCTTCAGTGGAGACCTCCAT
CATCAAGTTCAAAGACCAGGACTTTACCACCTTGCGGGATCACTGCCTGAGCATGGGCCGGACGTT
TAAGGATGAGACATTCCCTGCAGCAGATTCTTCCATAGGCCAGAAGCTGCTCCAGGAAAAACGCC
TCTCCAATGTGATATGGAAGCGGCCACAGGATCTACCAGGGGGTCCTCCTCACTTCATCCTGGATG
ATATAAGCAGATTTGACATCCAACAAGGAGGCGCAGCTGACTGCTGGTTCCTGGCAGCACTGGGA
TCCTTGAC

| | |
|---|---|
| Sequence 867 | cMhvSB091f05a2 |

GGAGCTCCCCGCGGTGGCGGCCGGCCATGCTCTCCTCCTCTGCCAGTCTCCTCCACCACTCTCTAAC
CTGAGAGCCTGTGGAACCTGCCCGTCTCCCCTCCTCCATCAGACACACCTGCCTAGGAAACAGGAA
AGGACCTCGGAAGTCTTCTAAGGAGAGTCATGGCGTATTACCAGGAGCCTTCAGTGGAGACCTCC
ATCATCAAGTTCAAAGACCAGGACTTTACCACCTTGCGGGATCACTGCCTGAGCATGGGCCGGAC
GTTTAAGGATGAGACATTCCCTGCAGCAGATTCTTCCATAGGCCAGAAGCTGCTCCAGGAAAAAC
GCCTCTCCAATGTGATATGGAAGCNGCCACAGGATCTACCAGGGGGTCCTCCTCACTTCATCCTGG
ATGATATAAGCAGATTTGACATCCAACAAGGAGGCGCAGCTGACTGCTGGTTCCTGGCAGCACTG

| | |
|---|---|
| Sequence 868 | cMhvSB092b02a2 |

NNATTGGAGCTCCCCGCGGTGGCGGAGATGTAGTCTTCACAGTGAGTTGTTATTTGTAGCTGTGTT
TTTGTTTTTGTATAGCTTATAGCAATGCAGTGTGCTTTTTATTAACATCATTTTCTTTTCTTTTTGCA
GTGATTATTTATTCAAGTTACTTCTGATTGGCGACTCAGGGGTTGGAAAGTCTTGCCTTCTTCTTAG
GTTTGCAGTAAGTTGAAATTGAAATGTCTTTACAATTAATGGTACAATTAATGCTATGTATGTTTTC
TAGGTAGATAAAATTAAACAGTTTTATTCAGAATAAGTTAATTCTTCCAGAATTTATATATTTAAA
GACTCCAAATATACATCCCCAGTGGTATCTTGGACTGTTAAATAGAAAAATATTGTTGCTCTTAAA
AGAAATTCAGTGAAGTCTGGTTATAAAGTCAGAATGTCTAATACTTTTGGTCAGAGTCAAACAGCA
GTTCCAATATAGGCAGCAAGTTAAAGGGGTAGTTGGTGGCCTGTGTTGAAAGCGACTTGATGAAA
ATAAATCTTTAAATTAAACTTTAGTAGAGCANANNNAAAAAAAAAA

| | |
|---|---|
| Sequence 869 | cMhvSB092f01a2 |

AGGTACAACTGCATACACGGAACTTTTGCCGTAACCACAACAAACGCCCATCCAGATGGCTCCGG
CTTAAGTTTCTATGCTTCACTAACCCCAAGGCCCACTAGTGCAGCCAGCAGTTGGGTTTTCCTCTTT
GGCAAGTCAGTCAGGCCATACAGAATCTGCTACAAGTTCCCTTCCTACCAGTTGAACTGTTTGCTG
AGCATGCAGGAATAGCCTCTGAATAGTATGGCCTGCTGTAAAGGGCAAGCTGGAAGTACCTGCCC
GGGCGGAATGATCAGGAGGAGACAGCCGGCGTTGTGTCCACCCCCCTCATTAGGAACGGTGACTG
GACCTTCCAGATCCTGGTGATGCTGGAAATGACTCCCCAGCGTGGAGATGTCTACACCTGCCACGT
GGAGCACCCCAGCCTCCAGAGCCCCATCACCGTGGAGTGGCGGGCTCAGTCTGAATCTGCCCAGA
NCAAGATGCTGAGTGGCGTTGGAGGCTTCGTGCTGGGGCTGATCTTCCTTGGGCTTGGCCTTATCA
TCCGTCAAANGAGTCGGAAAGGGCTTCTGCACTGACTCCTGAAACTGTTTAACTTAAGACTGGTTA
TCACTCTTTNTGTGATGCCTGTTTGTCC

| | |
|---|---|
| Sequence 870 | cMhvSB093f02a2 |

TGGAGCTCCCCGCGGTGGCGGCCGATGTACACCTNGNGCATNCAACCGNNTNCATGNNTTNCNNC
NCNNGCTAANCTATNCCCTTACCCTCTNGNGGANGNNNGTTGCNNATNTTTNGTCTCNTTTACCGA
ACGGNTNNTTGAGNGCTNGGCGTAATCATANGTACATATCTTGTNGCTTCGTTCTTGAAGTCANNN
ACACCACATCGAGCGGCCGCCCGGGCAGGTACAAAAGCCAANATGCCCATTGTGGGCCTGGGCAC
TTGGAGGTCTCTTCTCGGCAAAGTGAAAGAAGCGGTGAAGGTGGCCATTGATGCAGAATATCGCC
ACATTGACTGTGCCTATTTCTATGAGAATCAACATGAGGTGGGAGAAGCCATCCAAGAGAANATC
CAAGAGAAGGCTGTGATGCGGGAGGACCTGTTCATCGTCAGCAAGGTGTGGCCC

| | |
|---|---|
| Sequence 871 | cMhvSB095b05a2 |

GCNNATTGGAGCTCCCCGCGGTGGCGGCCGAGGTACGGGTCCTCCTCACGAGCTGCCGCCGCACT
GCACCGCACAGTGAAACACTGCAGGTTGTTACTGAGGAGGAAGACACAGGCTGCTGAGCAAAGTG
AGGCCAAGAACCAACATACCCACAGCAGGGAGGGTTTCACAGGCAAACAGGGCAATGGGCAGGG
GTGACAGTCAAGTATTTGTCAAATATTGCCAAGTTAAACTGCTTCTCAATAAGAGGAATGCCTCAG
AATCCCTGTGGTGTGTTTTTAAAAATATACAACTGGTCCCCATAACACCCCTAGTGAATCGCAATC
TCTAGGGGCTGAATCTGGACGTGT

| | |
|---|---|
| Sequence 872 | cMhvSB095b08a2 |

ACGCGGGGGAAAGTGTGTAGCACCTCCACCTTCTCTCTCTCTCTCCCTCTCCCTCTCCTGCCAGCCA
AGTGAAGACATGCTTACTTCCCCTTCACCTTCCTTCATGATGTTACCATTGGAATGACATACTGCAT
CCTATAGTTATACCATCCACTCTGAAATCAATGTGAATTTAACTTCAGTTCCATACAGAAACTTTTT
TTCCACAGGAGTTTAAGCCCAAGCTGGAGTGCGATGGTGCAATCCCAACTCACTGCAACCTCTGCC
TCCCAGGTTCAAGCTATTTTCCTGGCTTAACCTCCGGAGTAGCTGGAATTACAGATGTGCGCCCCC
ATGACCAGTAAGAAACGGTTGAACTGGATGCAATTTTTATCACAGCTTGTGTAAGACTGCCTCTGT
CCCTCCTCTCACATGCCATTGGTT

| | |
|---|---|
| Sequence 873 | cMhvSB095d09a2 |

AGGTACGGGTCCTCCTCACGAGCTGCCGCCGCACTGCACCGCACAGTGAAACACTGCAGGTTGTTA
CTGAGGAGGAAGACACAGGCTGCTGAGCAAAGTGAGGCCAAGAACCAACATACCCACAGCAGGG
AGGGTTTCACAGGCAAACAGGGCAATGGGCAGGGGTGACAGTCAAGTATTTGTCAAATATTGCCA
AGTTAAACTGCTTCTCAATAAGAGGAATGCCTCAGAATCCCTGTGGTGTGTTTTTAAAAATATACA
ACTGGTCCCCATAACACCCCTAGTGAATCGCAATCTCTAGGGGCTGAATCTGGACGTGTACCTGCC
CG

| | |
|---|---|
| Sequence 874 | cMhvSB095h08a2 |

NATTGGAGCTCCCCGCGGTGGCGGCCGGCCATGCTCTCCTCCTCTGCCAGTCTCCTCCACCACTCTC
TAACCTGAGAGCCTGTGGAACCTGCCCGTCTCCCCTCCTCCATCAGACACACCTGCCTAGGAAACA
GGAAAGGACCTCGGAAGTCTTCTAAGGAGAGTCATGGCGTATTACCAGGAGCCTTCAGTGGAGAC
CTCCATCATCAAGTTCAAAGACCAGGACTTTACCACCTTGCGGGATCACTGCCTGAGCATGGGCCG
GACGTTTAAGGATGAGACATTCCCTGCAGCAGATTCTTCCATAGGCCAGAAGCTGCTCCAGGAAA
AACGCCTCTCCAATGTGATATGGAAGCGGCCACAGGATCTACCAGGGGGTCCTCCTCACTTCATCC
TGGATGATATAAGCAGATTTGACATCCAACAAGGAGGCGCAGCTGACTGCTGGTTCCTGGCAG

| | |
|---|---|
| Sequence 875 | cMhvSB095h12a2 |

GAGACTTTGCCTTTTCAACATGGATGGTTCCTCCCGCTGCCGNTGCCGTTCCAGGAGACAGCATTA
CAGAGCATCAGTTAGGTGCAGAGACTGGGCAGTGCGCCCGTGTGCAAAGACAGGAGACACGAATC
TTCCTGAAGGAGTGACAGTCTAGGGAGGAAGGCAGACTGCAGGGGACCTACTTCTCTCGGGAATC
TCAATACTTGGAACAAGAACCTCCTAGACGGACCCTTTGGCATAATGAATTGGACCAACTGTAGGT
TCCAGGACTAGAGAGCCAGCAATGCCTCCATGAACAATCTCACCCAATTACTCTGCTCANGAAAC
GAGGTAACTGATGGACAGCCGAGGCAGCCCCTTAGGCGGCTTAGGCCTCCCCTGTGGAGCATCCC
TGAGGCGGACTCCGGCCAGCCCG

| | |
|---|---|
| Sequence 876 | cMhvSB096d04a2 |

CGATGTACTGNNGGTTCTNANTCAAGGATCCCAGAGNTGCCAGGAACCATCATTCATCTNCGCCTC
CTTGNTGGATGNCAAATCTNCTNATATNATCCACGATNAANTNAGGAGGACCCCCNGCTAGATCC
TGTGNNCGNTNTCATATNACATTGGAGAGGCGTTTTTCCTGGAGCAGCTTCTGGCCTATGGAAGAA
TCTGCTGCAGGGAATGTCTCATCCTTAAACGTCCGGCCCATGCTCAGGCAGTGATCCCGCAAGGTG
GTAAAGTCCTGGTCTTTGAACTTGATGATGGAGGTCTCCACTGAAGGCTCCTGGTAATACGCCATG
ACTCTCCTTAGAAGACTTCCGAGGTCCT

| | |
|---|---|
| Sequence 877 | cMhvSB096e07a2 |

GCCATGCTCTCCTCCTCTGCCAGTCTCCTCCACCACTCTCTAACCTGAGAGCCTGTGGAACCTGCCC
GTCTCCCCTCCTCCATCAGACACACCTGCCTAGGAAACAGGAAAGGACCTCGGAAGTCTTCTAAGG
AGAGTCATGGCGTATTACCAGGAGCCTTCAGTGGAGACCTCCATCATCGAGTTCAAAGACCAGGA
CTTTACCACCTTGCGGATCACTGCCTGAGCATGGGCCGGACGTTTAAGGATGAGACATTCCCTGCA
GCAGATTCTTCCATAGGCCAGAAGCTGCTCCAGGAAAAACGCCTCTCCAATGTGATATGGAAGCG
GCCACAGGATCTACCAGGGGGTCCTCCTCACTTCATCCTGGATGATATAAGCAGATTTGACATCCA
ACAAGGAGGCGCAGCTGACTGCTGGTTCCTGGCAGCACTGG

| | |
|---|---|
| Sequence 878 | cMhvSB096h06a2 |

NNATTGGAGCTCCCCGCGGTGGCGGCCGAGGTACGCGGGGAGATGATTTAGGGTCTCTGAGAGAA
GAAATTTTTAAGGATTCAAGAGGTGATCTGGCTTTTGTGAAAGTGTACGCGGGGACGGCGTCTGCT
GGCGGCCGCGGAGACGCAGAGTCTTGAGCAGCGCGGCAGGCACCATGTTCCTGACTGCGCTCCTC
TGGCGCGGCCGCATTCC

| | |
|---|---|
| Sequence 879 | cMhvSB097a09a2 |

AGGTACTGTGGGTTCTGAGTCAAGGATCCCAGTGCTGCCAGGAACCAGCAGTCAGCTGCGCCTCCT
TGTTGGATGTCAAATCTGCTTATATCATCCAGGATGAAGTGAGGAGGACCCCCTGGTAGATCCTGT
GGCCGCTTCCATATCACATTGGAGAGGCGTTTTTCCTGGAGCAGCTTCTGGCCTATGGAAGAATCT
GCTGCAGGGAATGTCTCATCCTTAAACGTCCGGCCCATGCTCAGGCAGTGATCCCGCAAGGTGGTA
AAGTCCTGGTCTTTGAACTTGATGATGGAGGTCTCCACTGAAGGCTCCTGGTAATACGCCATGACT
CTCCTTAGAAGACTTCCGAGGTCCTTTCCTGTTTCCTAGGCAGGTGTGTCTGATGGAGGAGGGGAG
ACGGGCAGGTTC

| | |
|---|---|
| Sequence 880 | cMhvSB097b12a2 |

AGGTACTGTGGGTTCTGAGTCAAGGATCCCAGTGCTGCCAGGAACCAGCAGTCAGCTGCGCCTCCT
TGTTGGATGTCAAATCTGCTTATATCATCCAGGATGAAGTGAGGAGGACCCCCTGGTAGATCCTGT
GGCCGCTTCCATATCACATTGGAGAGGCGTTTTTCCTGGAGCAGCTTCTGGCCTATGGAAGAATCT
GCTGCAGGGAATGTCTCATCTTAAACGTCCGGCCCATGCTCAGGCAGTGATCCCGCAAGGTGGTAA
AGTCCTGGTCTTTGAACTTGATGATGGAGGTCTCCACTGAAGGCTCCTGGTAATACGCCATGACTC
TCCTTAGAAGACTTCCGAGGTCCTTTCCTGTTTCCTAGGCAGGTGTGTCTGATGGAGGAGGGGAGA
CGGGCAGGTTCCA

| | |
|---|---|
| Sequence 881 | cMhvSB097c01a2 |

CCGGGCAGGTACCTGACTTTGGGTAAGTTGCCAGAATAAGATCATCAGGCTTGGCTTGGAAATTAC
ATACTTTTTCCCACCATTCTTTTGATAATATCAACGTAGGGACTCCATCTACTTCCATGATGTTAAA
CAGTTCTGGCTTTTTTTCCATCGTGGGAGCGTTTTTCTCAATCTTCGCCATTGGGAATCAGTTGGGC
TTTTGGCTTCTCTCTCCCTGTGTGAGCCAGTAAAGGGGATAATAAGGATCATTGTTTATATTCTCTG
TGAATTTATAATTAATGAAAAAGGATTTTTGTTGATCTTAAGCTGTAGACAATTTGGTGTGCTTTGC
ATGTCTTTCTGTATGGTTCTGGTATCTCAGGCAGCAGAGGAAGCAGCTTGCTGCCTTTAGTCAAAC
TGCTTCCTGGAAAC

| | |
|---|---|
| Sequence 882 | cMhvSB097c02a2 |

GGCNAATTGGAGCTCCCCGCGGTGGCGGCCGAGGTACTGTGGGTTCTGAGTCAAGGATCCCAGTG
CTGCCAGGAACCAGCAGTCAGCTGCGCCTCCTTGTTGGATGTCAAATCTGCTTATATCATCCAGGA
TGAAGTGAGGAGGACCCCCTGGTAGATCCTGTGGCCGCTTCCATATCACATTGGAGAGGCGTTTTT
CCTGGAGCAGCTTCTGGCCTATGGAANAATCTGCTGCAGGGAATGTCTCATCCTTAAACGTCCGGC
CCATGCTCAGGCAGTGATCCCGCAAGGTGGTAAAGTCCTGGTCTTTGAACTTGATGATGGAGGTCT
CCACTGAAGGCTCCTGGTAATACGCCATGACTCTCCTTAGAAGACTTCCGAGGTCCTTTCCTGTTTC
CTAGGCAGGTGTGTCTGATGGAGGAGGGGAGACGGGCAGGTT

| | |
|---|---|
| Sequence 883 | cMhvSB097g01a2 |

CGAGGTACTGTGGGTTCTGAGTCAAGGATCCCAGTGCTGCCAGGAACCAGCAGTCAGCTGCGCCT
CCTTGTTGGATGTCAAATCTGCTTATATCATCCAGGATGAAGTGAGGAGGACCCCCTGGTAGATCC
TGTGGCCGCTTCCATATCACATTGGAGAGGCGTTTTTCCTGGAGCAGCTTCTGGCCTATGGAAGAA
TCTGCTGCAGGGAATGTCTCATCCTTAAACGTCCGGCCCATGCTCAGGCAGTGATCCCGCAAGGTG
GTAAAGTCCTGGTCTTTGAACTTGATGATGGAGGTCTCCACTGAAGGCTCCTGGTAATACGCCATG
ACTCTCCTTAGAAGACTTCCGAGGTCCTTTCCTGTTTCCTAGGCAGGTGTGTCTGATGGAGGAGGG
GA

| | |
|---|---|
| Sequence 884 | cMhvSB101h01a2 |

NGATTGGAGCTCCCCGCGGTGGCGGCCGAGGTACCTGACTTTGGGTAAGTTGCCAGAATAAGATC
ATCAGGCTTGGCTTGGAAATTACATACTTTTTCCCACCATTCTTTTGATAATATCAACGTAGGGACT
CCATCTACTTCCATGATGTTAAACAGTTCTGGCTTTTTTTCCATCGTGGGAGCGTTTTTCTCAATCTT
CGCCATTGGGAATCAGTTGGGCTTTTGGCTTCCCTCTCCCTGTGTGAGCCAGTAAAGGGGATAATA
AGGATCATTGTTTATATTCTCTGTGAATTTATAATTAATGAAAAAGGATTTTTGTTGATCTTAAGCT
GTAGACAATTTGGTGTGCTTTGCATGTCTTTCTGTATGGTTCTGGTATCTCAGGCAGCAGAGGAAG
CAGCTTGCTGCCTTTAGTCAAACTGCTTCCTGGAAACCCAGAACCAGGTCCAGCTCCAGGACACTG
TGCAA

| | |
|---|---|
| Sequence 885 | cMhvSB105g08a2 |

GCCATGCTCTCCTCCTCTGCCAGTCTCCTCCACCACTCTCTAACCTGAGAGCCTGTGGAACCTGCCC
GTCTCCCCTCCTCCATCAGACACACCTGCCTAGGAAACAGGAAAGGACCTCGGAAGTCTTCTAAGG
AGAGTCATGGCGTATTACCAGGAGCCTTCAGTGGAGACCTCCATCATCAAGTTCAAAGACCAGGA
CTTTACCACCTTGCGGGATCACTGCCTGAGCATGGGCCGGACGTTTAAGGATGAGACATTCCCTGC
AGCAGATTCTTCCATAGGCCAGAAGCTGCTCCAGGAAAAACGCCTCTCCAATGTGATATGGAAGC
GGCCACAGGATCTACCAGGGGGTCCTCCTCACTTCATCCTGGATGATATAAGCAGATTTGACATCC
AACAAGGAGGCGCAGCTGACTGCTGGTTCCTGGCAGCACTGG

| | |
|---|---|
| Sequence 886 | cMhvSB105h02a2 |

ATTGGAGCTCCCCGCGGTGGCGGCCCGAGGTACTGTGNNTTNTTATTNNTNGATNCNATTGCTGNC
ANGAACCAANATTNATNTNCGCCTCCTTGTTGGATGTCAAATCTGCTTATATCATCCAGGATGAAG
TGAGGAGGACCCCCTGGTANATCCTGTGGCCGCTTCCATATCACATNGGAGAGGCGTTTTTCCTGG
ANCAGCTTNTNTCCTATGGAAAAATCTGCTGCNGGGAATGTCTCATCCTTAAACGTCCGGCCCATG
CTCAAGCANTGATCCCGCAAGGTGGTAAAGTCCTGGTCTTTGAACTTGATGATGGAGGTCTCCACT
GAANGCTCCTGGGTAATACNCCNTGACTCTANNTAAAANACTTCCAGGTCCTTTCC

| | |
|---|---|
| Sequence 887 | cMhvSB024b11a2 |

CCCTTAGCGTGGTCGCGGCCGAGGTACGCGGGGAGCTATATCGGGGATCCAAAGGTTTCACACAG
GATGAGTCCTGTGTCTACATGCAGCGTAGCAGGAGCTGGGAATGGAAGCAAACCAATATTCCAGC
ATCTGCTTCTAGAACAGTGATCAGGATCGCTATCGTTAATAAGATGGGTGTATGTGGGACCCAAGA
CTCATCTGTCAAGCCCTTCTTCTGACTGCTTTTAAGGTGCCAGTCACGAATTGCCCGAACATTACCT
GCTGATCAGAACCAGAATGTCGGCCATACTGGGAAAAGGATGATGCTTCGATGCCTCTGCCGTTTG
ACCTCACAGACATCGTTTCAGAACTCAGAGGTCAGCTTCTGGAAGCAAAACCCTAGAAGGAGCAC
AAGTC

| | |
|---|---|
| Sequence 888 | cMhvSB038e02a2 |

ACTGATTGGGGAAGTGATAAATGTTCATGAAATCTTCACAATTTATGTTCAGAGATTGCAGTAAAG
ACAGGCGTAAGAAATTATAAAAATATTAATGTGGGGAATTAAGAAATGTCCATGAAATCTTCACA
ATTTATGTTCTTCTGCCATGGCTTCAGCCAGTCTCTCTGTTGGGGGTCCCTGAATTCCTGCAACAGC
TCAGAAACTAGAGGCTGAGAAAGGGAGTCACTCAAACCTTGAATCCCTGTGGCCAGTGAATAAGA
TAGACGTCCAGATAGCTCAGCTTCAGGTCCTTGAGGGTCTTCTCAAAGGCTTTCCTCACAAGGGGT
CTCTCAAAGAAAGTGGGCCA

| | |
|---|---|
| Sequence 889 | cMhvSB101b12a2 |

NTTCTNNATNTATTGGNTACGCTGGTCTGGNANANTTGANCTTNAGNNNTACACNNACTNNNGAC
NTCCANGGGGNNCNNATTACCGNCATNANCCACCNTNNTGNGNNGNNNAANATNGCNNTTNNAA
CAAACATNNNAAANACTCNCCTGTGGCATTCGTTTCCTAGGGCTGCATANCAAAATACCACAAAC
TGGTTGGCTTACAACATCATTTAGTTTCCTACAGTTCTGGAGACTGGAAGTCTAGGCAGCAGGGCC
TTCTGACCTCTCTCATTGGTTTATANATGAAATGCCTCTTCTCCCTGTGTCTTTACAAGGNCTTTTCT
GTACCTTTCTATGTCCTAATCTCCTGTTCCTGTAAAGACACAGTTATATTGGATTAAGGCACATCCC
TAGTGACTTCATTTTACTTTAA

| | |
|---|---|
| Sequence 890 | cMhvSB082a07a2 |

CCGGGCAGGTACCATGTTCAGGAAACCAAGGACGATATTGCTCTACTGTTGGAAACAGAGTAATC
AAATTTTCTGTGCTAGCCTTAATTCCTGCCCTCTTTAAGAGGAGCTTAATAAAATGTAAATATGCA
GAATGTTTACTTTTGGATTGTCCCATGGTGTCCCTGGAATGCTCCGAGTGCACAAGCTTACCGCAA
GGCCGACCACACGTTCTCGGGAGTTCCTGGACAGACCGTTCTTCACAACGACCACGCTCAGGTGTA
ACTTCACCTGGGTTCAAGGAGACCGTGTTGGGTGCCAAAGATGTAGGGGAACCTGCCTGATACAC
CACCCGCAGGCTCTCCCCTTCCCGGTGGAGACGAGGGAATGAGAAAAGAAATAAAGACAAAGAC
ACAAAGTTTAAGAGTTAACAAAAGTGGGTCCAAGGATCCATCGCAACGTGGAGATTGCAAAGGCC
CCCGCGTACCT

| | |
|---|---|
| Sequence 891 | cMhvSB030a07a2 |

CCCTTTCGAGCGGCCGCCCGGGCAGGTACTTTCTCTTGGTCTCTGCCATCACAATGGCAGCCCGGG
TTCGGGGTTGAATTCCCAGCTTAAGGGATCATCCTTTGTCTTCTGTTTGTCTATGTATTTATATGTA
GTATGTGTGTGTAATATAAAAGAATTTTAATTAATTGCTTTAATAATAATAAGCTTAAATCAAATA
TTTTGTCACATAAGTAAAAAGTGTAATGCCTTTTAGTTCATGTGACTTAAGTAATCTTTGGGAAATA
AAAACAGTTTTAAAGATTACTGGTAAAATAAAGACATTTGGTCTAAATTATGCAGGTCAGATATTA
AGTTTGCTAAATGCCTTAAGGTCATAAACTGCTGCTTTGACTTTTTTTTTTTTNGAAANAAAACCNC
CCCCNGGGNNACAGANNNAAATTTCATNTCCTNTNANTAAATAATTAACCCCTTTTTAAAAAGTCC
AAAANCCCNCAAAAGTCCAAAACTTAAAAANTTTNAACACTGGACCCNAGGCCNAAGNTAAAAC
NTTTTNCNTTTTAAACCTCCTTGGGNATNGGNNCNCCANTNAAAAANGCNNGGGAAAAACTTTGTT
TTTTTCCCNAAAAANTTTTTTAAAAATTTTTNGTAAAAATTGCCCTTTTNGGGTTTTTTTTNGTNAA
GGGNGTNTTTGNAAANAAAAATAAAATTTAAAAGNTTGGCCCCNTTGGGGGNTTTTNCCCCNNGG
AATTNNNNNAATTTTGTTNGCCAAAANTTTCCNAAAAAAAAAAAAAAA

| | |
|---|---|
| Sequence 892 | cMhvSB095f04a2 |

ATTGGAGCTCCCCGCGGTGGCGGCCGCCCGGNCAGGTACGCGGGGGAGTTCTGCTCTGTACTTTGC
CCACTTGGGTTCTATTCTTATCTCCTCTTAGCTTTGGCTCTCCAGCATGGACTTTGCTTGAGTCTTTG
ATCTTGCATCAACTGATGTTTCTAGTAAGGGCCGACACCACCTCTCTCCCAGTGCTGACAGATGAC
ATCCCTGCTGAGTCCCGATTTCCACCAGCTGTTTAGCGTTCTGGATCATTCCCTGTTGACCAGCTGC
TTCTGGCCATCCTCACCTGGACAATCTGCAGTAGTTTTGGCATGTTGCTCACTGCTTCCATTGGCTG
ACGGTTTGAAGAAGAACTGACCAGCAAGTGGTTATATCTTTTTGAAGGCAGTGGAGTCCCGTATGG
CCCAATCAACAACATGAAGAATGTATTTGCAGAACCTCAGGTATTACACAATGGCCT

| | |
|---|---|
| Sequence 893 | cMhvSB031h07a2 |

CCCTTTCNAGCGGCCGCCCNGGCNGGNACAGTGCNTCCCAAAGCCCCCAGANGCCTACCCCTGTC
GCCNGTGTGCCCACAATGAAGAATATACAGTCAAGGAAGATGATTTTGCAGCTCTAAGATNTAAT
TTCTGCCCTGTNATCTTTATGACTTGCATGAACCCTCTTGCTCTTCTCTTTAAGCTGANATTTCCCT

| | |
|---|---|
| Sequence 894 | cMhvSB013d11a1 |

CTACATAAATGGGGGTTTCACAGTTCCGTTCTACAAGCAGCTCCTGNGGAAGCCAATCCAGCTGTC
GGACCTGGAGTCCGTGGACCCAGAACTGCATAAGAGCTTGGTGTGGATTCTAGAGAATGACATCA
CGCCTCCCGCGTGGCGGGCTGAGGCCTGAGATTCCAGAAACCGAGGGAAAAGGCTCGTCTCCCTC
CTCCTTTGGAGAGGGCAGGCCAGGGGACTTTCCTAGGTGGCTCCCACCCATTTATTCTCCTTTATTA
TAGTTTGCCCACCCCTCCATCACCCATCCAATAAAACGCAGCCAGGTTTCGCCCTCAGNAAAAAAA
ANTTTNACAAAAATNNGGGNANAACNNAANAANNAACCTNTNNCCAAANGNCCNNTTAAANGGC
CNNAANCNCNAAANNGGCCCNNNNGGGGGNGGCCGTTAAATTTTTNAAAAAAAAAACNTTCNAC
ACCCTCCCTTGANCNTGAANAAAAAAAGGANNGCACCTGGGGGGGGNAACTTGTTTTTGGCCCTT
TTAAANGGTTCNAANTNANNCNATGCTTTNCAAATTTCCCAAAAAAAGCATTTTTTTNCCCGGGNT
TTTNNTNGGGGGTTGGCCCAACCCANNNNNGGTTTTTTNTNNTGGNTGGNACCCCCG

| | |
|---|---|
| Sequence 895 | cMhvSB093a04a2 |

CTGATTGGAGCTCCCCGCGGTGGCGGCCGAGGTACCCTTTCTGCAGAAAGTATAAAAATGGCCTTG
CTAAGGAATTTAAATTTACATTCAAGTGCTATTTCTTTACAGCACCGGAAAACAAGCATTTCAAAC
AAGACCTACTATACAATGACAGTAATTAAGATAATGTGATACTGGTGGAGGAATAAGCACGTAGA
CAAATCGAACATAATAGAGAACCCAGAAATAAACCCCTACAAATATATACGCAACTATTTTTTAA
CAAAGATTCAAAAGCAATTCAGTGGAGAAAAAATGACCTTTTCAACAAATAATGGTGGAGCANTT
GAACATCTACAGCAAAAACAAAGCTCAACTTCAACCTCACACCTGATATAAAACATGAATAAAAA
ACTATGAAACTTTTAGAAAAATAAATAAATAAACCTTAGG

| | |
|---|---|
| Sequence 896 | cMhvSB038c05a2 |

CCCTTAGCGTGGTCGCGGCCGAGGTACTTTTTTTTTTTTTTTTTTTTTTTTTTTTTTTTTTTTTTTTTTT
TTTTTTTTTTTTTTTTTTTTTTTTNCCNCCNANNNNNNAAAAAAAAAAANNTTTNGGGGNGGAAAA
AAANTTTTTTNNTTTTNNNGGNAAAAAAAAAAAAAAAAAAANGGGGGGGNNNNNAAAAAAAAAA
NNNNNNNTTTTNNNNNNNNNNCCCCTTTTTTTNAAAAAAAANNNTTTTTNNAAAAAAAAAAAANA
NCCNCAAAAAANNGGNTTTTTTTTTTTNNNAAAAANNCCCCCNAATTTTTNAAAANTTTNNNNGGG
GGGNAAAAAAAAAAAANNTCCTTTTTTNANNTGGNTTTNNGGGNNNAGGGTTNNCNNTTTTNCCC
CNNCAAAAAAAAAANNTTNTTTTTTTAAAANAAAANNNACCCNNTNTNTTTGGTTTTTTNANAAA
AAANCCNNNNCCCCAAAGAGGGGGGGGGGNGCCNNNCCNCTTCNTTTTTNTTNTTTTNGGNNNNG
ANGGGNNNNCNCCAAAAAAAAAAAANAAAAAAAAAAANNTTTTTTTTTGGGGGGGGGNTCTTTTT
TTTTTTNATANNNANNNCGGNGGGNNNAAAAAAAAAAAAAAAAAAAANT

| | |
|---|---|
| Sequence 897 | cMhvSB083h11a2 |

AGGTACATTCTCACGACCGGCCTGATCCCTGTGCTGGAGAAAGAACACGACCCCCGAGTGATAAC
CGTCTCCTCAGGAGGAATGTTGGTTCAGAAACTGAACACCAATGATCTCCAGTCCGAAAGAACAC
CATTTGATGGAACTATGGTCTATGCACAAAACAAGAGGCAGCAAGTGGTTCTGACGGAGCGGTGG
GCCCAAGGGCACCCGGCCATCCATTTTTCTTCCATGCATCCTGGCTGGGCCGACACCCCAGGTCAG
ACAGGAATGAGCAGGAGCTGAGGAAGGTAGTGGGAGAGGCCCAGACTGCCTCACCACTCCCCAG
GTTTTTGGAAATAATGATGCATGAAGGTAAATGCCAGCCACAAGGACACAGCTCGAATGATCTGG
AAGCGTGTTGGAGCAGCGGTGGAGGGGAGCAGAATTCTCTTCCGGATTGGCCTCACCAACTCCAT
GACCTCAGGCAGCTCACCTGGGCTCTCTGCAGCTCTTTCCTCCTCTACAAACAAGGGAACTGAAAG
CAGCAACAGCCACAGCACACACCCCAGGGTGCACCCGCGGGCGCCAAAGAACTGGTCTCAAGCGC
TTGTCTTGCGGATTAACGCATTTTGTCCTCAAGCCCTCTGTGGAGTGGNCCTACTGTCTTTTATCAC
ACCCATTTACAGATGAAGGGACTGANGCCCCAAANAGCTTAAAACTTCCAACCCGGCCTGGCCAT
GGGGTT

| | |
|---|---|
| Sequence 898 | cMhvSB092h03a2 |

CCGGGCAGGTACACTCATATGGTTTTACTCCGGCAGTCTTCTTCGTCACACTGAGATTGGGACTGA
AGTTTTCTGCACATTGACTACCTTCTTTACCTTCACAGAGTCTCTCTCCCGTATGGCTTCTTANATTT
CGTCCTTGGTTTTTGTGTTGATCTTCAACATTCGGGTCTTCCCATTTTTCCCCTATAGATGCCAGGTT
CTTGAATGTTTCCTGCATCACATCTCTGTANAGTTTCTTCTGTGAAGGAGCCAGCAGAGCCCACTCC
TCCTGGCTGAAGCTCACAGACACATCCTCAAAAGCCACTGAGTCCATTTTCCGGCCTCGCGGGTGT
CCCGGTGTTGTCCCTAAGGTTCACGGAGCCAGCGCAGGGTACCT

| | |
|---|---|
| Sequence 899 | cMhvSB097a08a2 |

ATTGGAGCTCCCCGCGGTGGCGGCCGAGGTACAAACTTGTTTCCAGGCAAACTTGTCCAACCCATG
GCCCACGGGCTGCATGAGGCCCAACACAAATTCACAAACTTTCTTAAAACATTATGAAATTTTTTT
GGTGATTTTTTTAGTTCATCAGCTATTGTTAGTGTATTTCATGTGTGGCCCAAGACAATTCCTCTTC
CAATGTGGCCCAGGGAAGCCAAAAGACTGGACACTCCTGTCCTAGAATATTTAATTTGGGTCTGCC
AGAGAGGTTAAAAGAATCGTAACTTTTTAAAAAGCCTGTAATTTTATTTTTATTTTTACTAGATATG
GGGTCTTGTTATACTAACCCAGGCTAGTCTCAAACTCTTGGCCTCAAGAAATCCTCTCACCTCGGC
CTCCCAAAATGCTGGAAATACAGGCATGAGGAACCACACCCAGCCAGCCTACAATTTTAAAACCT
AAGGCA

| | |
|---|---|
| Sequence 900 | cMhvSB032f05a1 |

CCCTTAGCGGCCGCCCGGGCAGGTACGCGGGGGCTGCTGGAAACGCAGTTCCGGTTAGGCGGCTG
AGTTTGTTTACGTTGCTAACAGATCTAGCCCCTGCTTTCCCTAGTTCCAGTTCCAAGATGGGGAAAT
CCTTCGCCAACTTCATGTGCAAGAAAGACTTTCATCCTGCCTCCAAATCCAATATCAAAAAAGTAT
GGATGGCAGAACAGAAAATATCATATGATAAAGAAGAAACAAGAAGAATTGATGCAGCAATATC
TTAAAGAACAAGAATCATATGATAATAGATTGCTTATGGGAGATGAACGTGTAAAGAATGGGCCT
TAATTTCATGTATTGAAGNCCCCCCCAGGAGCTNAAAAAAAGGA

| | |
|---|---|
| Sequence 901 | cMhvSB096b05a2 |

CCGGGCAGGTACGCGGGCGTGGGGGTGAGGGTTGAGAACCTATGAACATTCTGTAGGGGCCACTG
TCTTCTCCACGGTGCTCCCTTCAAGCCAACAAGGCCACACTGGTGTGTCTCATAAGTGACTTCTACC
CGGGAGCCGTGACAGTGGCCTGGAAGGCAGATAGCAGCCCCGTCAAGGCGGGTGTGGAGACCAC
CACACCCTCCAAACAANGCAACAACAAGTACCT

| | |
|---|---|
| Sequence 902 | cMhvSB092a05a2 |

ACTTTGGCCTCTCTGGGATAGAAGTTATTCAGCAGGCACACAACAGAGGCAGTTCCAGATTTCAAC
TGCCCATCAGATGGCGGGAAGATGAAGACAGATGGTGCAGCCACAGTTCGTTTGATTTCCACCTTG
GTCCCTTGGCCGAACGTCCACGGAGTAGTATAATATTGCT

| | |
|---|---|
| Sequence 903 | cMhvSB092a05a2 |

TCGGTCAGGGACCCCGGATTCCCGGGTAGATGCCCAGTAAATGAGCAGTTTAGGAGGCTGTCCTG
GTTTCTGCTGGT

| | |
|---|---|
| Sequence 904 | cMhvSB092a05a2 |

GCGCCCGGCAGGTGATACCTCCGCCGGTGACCCAGGGGCTCTGCGACACAAGGAAGTCTGCATGT
CTAAGTGCTAGACATGCTCAGCTTTGTGGATACGCGGGACTTTGTTGCTGCTTGCAGTAACCTTAT
GCCTAACAACATGCCAATCTTTACAAGANGTGAAGTAAAACTTTTTTTAAGAATTTTTAAAAATAC
TTTGATTCCCTTGGCTACAGGTGATGTCTTCTCTTGGAANGGGAAGAAATTACCATTAATATTGAC
CATTCCTANATTCCCA

| | |
|---|---|
| Sequence 905 | cMhvSB094f03a2 |

AGGTACTGAGGATGAATTTCATGCCACTGGCCTCCAAAAAACCCACTGGAAACATTGCACGTGGA
GTAGCTGTCTGTCCAGGCTGGCGGCTGGTGAAGGAGGTTGTTGCCGGGGTTGAGATTCATTACACC
ACCTCCTTCCAGAATCATGATCTTGAGAGGTCTTGATGAAGGCTACCATCTTGCGCAGTCATGTAA
GAGAACTTACAGCACAGCTGTTCCCTCAAAGTGACTTTCATTTAAAATGCCTCTCATTTACCTAAA
GATTCTGGGTGGGAAATCCAATAGCTGTGGCTGATGGAGGGGAGGCAGCAGGCTGCAATCTCACC
AGCTCCTATAGGGATGGGGCACCACGGGCGTTATCAAGTCTCCCCGCGTACCTGCCCG

| | |
|---|---|
| Sequence 906 | cMhvSB038d09a2 |

CCCTTAGCGTGGTCGCGGCCGAGGTACTACTGTGTGTTGACTCTTGTAAATCCTCCCAGTGAAGAG
TCATCAAACCTGGGAGTGGTCTTGGGGCCCTGACATACCACTTCATGGAGCTGGTGATGGAAATTT
GCTGATGTTGTTGGCCACCCGAATGAGCATGCGAGCCCCTTTCATGTGATCTCCATTTTTAACATGA
ATCTTTACTAGTATATAGCTGTGCAGAATCATGAGGTTGGTGGCCATCTCGGAGGGAATTTTGATC
TTCTGGGATTTCAGTTCTGCATACATACTGAAGAGAACATCGTGTGCATTCCGGTAGTTGC

| | |
|---|---|
| Sequence 907 | cMhvSB038b07a2 |

CCCTTTCGAGCGGCCGCCCGGGCAGGTACCCACTCACAGTGATGCCAGCAAGAAGAGACTGATTG
AGGATACTGAAGACTGGCGTCCAAGGACTGGAACAACTCAGTCTCGCTCTTTCCGAATCCTTGCCC
AGATCACTGGGACTGAACATTGTNAGTGAACTTNTAGGTATCCTAATGGATGAATGTTTTTTTGCC
CCAGAGAGTGGCATTGAAACTGATTGGTAGTTGTCAGAAAACAACCCCGAGACAGTTTGCTTTTAA
ATTATGCTGTGCATAACATGGGTAATATAAATAAGACCCCAGGCCGGGCACAGTGGCTCACGCCT
GTAATCCCAGCGCTTTGGGAGGCCGAGGCAGGCAGATCATGAGGTCATGAGTTCGAGACCAGACT
ANCCAACATGGTGAAACCCCGCCTTTACTAAAAATCAAAAATTATTTGGGCATCGTGGAAACCCCT
GTAATCCCANCTNTTTGGGAGCCTTGANGCAGGANAATCATTTTGAA

| | |
|---|---|
| Sequence 908 | cMhvSB042b12a1 |

CACCGNGGTGGCGGCCGAGGTACTTTTTTTTTTTTTTTTTTTTTTTTTTTTTTCGNGCTCCANCAATT
TTTNTTTTCATGAATGAAAGTTGGGGATCAGCTGTTAGGTTCTGTGCCCAGNACACTGANTGNTGC
CTGGCNCCCACTTTTTATACAGTCNTTAACAGCAACTCCNTCATAGGAGGCTCCAGCCANAGTCAG
GGGCAACCTGTGAGCAGTCAGGAATTGCCTAGCTGACTNTAGTTTTTGCCAGTGGACCCTAGNGTA
TACTGGGGAATGCAGTTNTTGTGTAGATGGACCAAGNCAGTTGGCTCGGCNTNTCCTTAAANTCCT
AAATTTGGNGTAAGCAAGCTGNTTCNCTGGGCCCCGNTTGTTTGAAAACAANNTTCNCTGGANAA
TAANACACAAGCCCACTNAGCCCTNCAGGTGGTCCTGGTAACCAGGAAAACCNTCCCCANGCCAT
CACNAGTTCACNTTNTTNGAGGGGCCCAGGGGG

| | |
|---|---|
| Sequence 909 | cMhvSB079f12a2 |

GATTGGAGCTCCCCGCGGTGGCCTGGTTAGCAAATGTTTCTTCCTCCCTCACAGGCTATAAGAGCA
ATGAGCTGGCAACGCCCCTGANCACACTGTCTGCTGGTTAACCAATGGCATGTGAGAGGAGGGAC
AGAGGCAGNCTTACACAAGCTGTGATAAAAATTGCATCCAGTTCAACCGTTTCTTACCTGTGGAAA
AGAAGTTTCTGTATGGAACTGAAGTTAAAGTCACATTGATTTCAGAGTGGATGGTATAACTATNGG
ATGCANTATGTCATTCCAATGGTAACATCATGAAGGAAGGNGAAGGGGAAGTAAGCATGTCTTCA
CTTGGCTGGCAGGANAGGGANAGGGAGAGAGAGAGAAGGTGGAGGTGCTACACACTTTCAAACA
ACCAGATCTCATGANAATTCTATTATGAGCCCCGCGTACCTN

| | |
|---|---|
| Sequence 910 | cMhvSB051c06a1 |

AGGTACACGCTGGGGGACGCTCCTGACTATGACAGAAGCCAGTGGCTGAATGAAGAATTCAAGCT
GGGCCTGGACTTTCTCAATCTGCCCTACTTGATTGATGGGGCTCACAAGATCACCCAGAGCAATGC
CATCCTGCGCTACATTGCCCGCAAGCACAACCTGTGTGGGGAGACAGAAGAGGAGAAGATTCGTG
TGGACATTTTGGAGAACCAGGTTATGGATAACCACATGGAGCTGGTCAAGACTGTGCTATGACCC
AGATTTTTTGAGAAACCTGAAGCCAAAATACTTGGAGGGAACTCCCTGGAAAAAGCTAAAGCNCT
TACTCAAGAGNTTTCTGGGNGAAGCGGGCCATGGTTTGCAGGAAGACAAGGATCACCTTTTGTGG
GATTTCCTTGCCCTATGAATGTCCTTTGGACATGAAAGCCGTTATTATTTTTGAGCCCCAAGNTGGC
TTTGGAACCGCCCTTTCC

| | |
|---|---|
| Sequence 911 | cMhvSB079b08a2 |

ATTGGAGCTCCACCGCGGTGGCAGCGGCCGCCCGGGCAGGTACCACTTCTGCCCTCAGATGGTTTG
AACTCTCCTAAGCCAAGAGGCTGGAATGACTGAGTTGTCCAAACAGCAAAGATGGTGGCTCGTCC
CTACCCCTCGGCACTCCATCCCAAGGAGAAATCAAAACTCTGTCTGCCAGAGAATATGGGTGGGG
TTGGCTGGAGGCCTTGGTTGGGAGGCCCTGCCCTAAGATGAGGAATGGATCAGGTCCCACTTAAA
GAAGCAGTCTGGCCATGTTTTGGTAGAACAGCTGTGCTGTGCTGGGAGGTCCCATCAGTTCTCANT
TGGTGTGGTTTGGACTCTCCTACACCCACATGCTGGAATGGCTGAGTTGTCCAAACAGAAAAGATA
GCGGCTTGCTCCTTCCC

| | |
|---|---|
| Sequence 912 | cMhvSB068b04a1 |

CACAAGGTGCATTCTGCTTCCTGCAGGGGCTTGAAACACCAAGGCACTCCAGGGATCCTGGAGTC
AAAGCAGCAGCCCCGGTATGTTGCACTCCTTGGGGGTGACATGGGGGTAGCCGCAGTCCACCCTG
TCCTTGGCTGGCACGGCACACTGGTTTGCAGACAGGCCCACGTACTCCTCAGCAGAGCTGGAGGG
ACAAGCAAGGCCAGGACCAGCCCCAGCNATGCCAGAGCGCTCTGGCAGCCATGACCACNCGTTGG
GGNCTCCCGGGGACGCCAAGCTCAGGACTCCCGCGTACCTTGCCCCGGGGCCGGCCCGCTCTTAG
AAACTAGGNGGGATCCCCCCGGGCTTGCAAGGGAAATNCCGATATTCAAAAGCTTTATCCGATTA
CCCGTCNGACCCTCCGNAGGGGGGGGGGCCCNGGNTACCCCAAGCNTTTTTGTTTCCCCTTTTAAG
GTGGAGGGGTTTAAATTTGGCCGCCGCCTTTGGCCGGTAAATTCAATGGGTCCAATAANCTTGTTT
TCCCTTGTTGTTGAAAAAATTTGNTTATTCCCGCTTCAACAAATTTTCCAACAACCAACAATTACCG
AAGCC

| | |
|---|---|
| Sequence 913 | cMhvSB092a07a2 |

CNNATTGGAGCTCCACCGCGGTGGCCGAGCGGCCGCCCGGGCAGGTACTTTTGTATGACACTAGA
CTTCTGCTGTAGTGCTTCACCCAAAACAGAGGTTTAAGGAAATAAAAAAATAAAAATAATACAGA
AAAAAAACCAAAACACTTTACTGAAAATTTTCATTTCAACCAGAAGCAAACGTGTTCTAAGAAGG
CAAAGTAGAGTTAGGAACAACTCCGTGTTTCCCTCAGGAATAAACGTGATCTTTCACACTTGGGGG
TTGATAGTCAGCATGGAGTAACTTAGACCAACTTAAGAAGGAGGCATCTGGGGCTGTTCACCTAA
GGAGATGCTTCCCAGAGGCCCAGCATCTTGGGAGAACACCCCAAGTTCTCTGGAGAGGTCAGGAG
TTTGGGATGCAGGATCACACTGAAGGTCAGCCCAGCAAAGCAGCTGATCTAGGATATGGGCTTCT
GACTTCCAGATTCTACCATCATCACAGAGGCTCAAAGCTGGGGCCCACACCAAAAGGGCGTGATG
ATTCCCAGCCTTCAGCACAACAGGAATTGACCTGGAAAGAAAGGCCTTTATTCCTCTGACAGAAA
AACCTGATTCCCAAANGAAAATGATACTTTTACCTTATTCCCTTTCTCAATGGATCTGCATTTTCAT
GAATGAAGAAAAGAAGAAAGTTGAATTCTCTGACTTAGGAANGTTTCTTATTAAAAAGGTTNCAA
TANACTTCAACTTTTTTNAAGCTGGGCAGCAAAAAAAAAAAAAAAAAA

| | |
|---|---|
| Sequence 914 | cMhvSB068c08a1 |

GAATTGGACTCCACCGCGGTGGCGGTACAGCTTGGAGTGATCCCCCACGGTTTCAATTTTAAACCT
CTCATCATCTGAAATCTCCTCGTAGGATTTACACCAGGTGAACTGAGACGCGTCTGTCATTTCCTG
GCAGTCGAAGCCCAGATAGATGTTGCCTTGTTCATCGACACCAGCACTGATTTCCTTGGTGCCTGG
TCTCGCCTCTACCAACACAGGCTCCGACGTGTCTGAGGGCTTCCCCACGCCATTTGCATTGACTGC
CCGGACCCTGAAGACATAGGTCTTACCTTGCTGCAGGTCAGAAGACCTTTAAAATAACGGTTTGGC
TGTTGGTCGTCCTGATTGACAGGTGATCCACTCCTCCAGCCATTCCCTCCTCCCTGGAAGTCCACCG
AAATATCCAGAAAACAGGGCTTGCTGCCGGGAGNTACCTCCGGCCGCTCTAAGAACTAAGTGGGA
TCCCCCGGGCTGCAGGGAATTCGATTATTCAAGCTTATCGATACCGGTCCGACCTTCGAAGGGGGG
GGGCCCCGGTACCCCAAGCTTTTGGTTCCCTTTTAGTGGAGG

| | |
|---|---|
| Sequence 915 | cMhvSB026c05a2 |

AGGCTAAGGGAGGCTATGGGAGGCTAAGGGAGGCTCAGGTAAGGAGGATCTCTTGAGCCTGGGA
GGCAGAAGCTGCAGTGAGCCAAAATGGCACCACTGCACTCCAGCCTGAGTAACAGAGTAAGACTC
TGTCTCAAAAAAAGAAAAGAAAAGAAAAAAAGAATTCAAAGGAGAACTGACATATCACCCAGTG
GGTATATTACAGAATGCTTGCATGTATGTGTGTGTGTGTATGGTTTTATATATATTTATATAAAGTA
TAAATGCTTTTGCTTATATATATGAATCTCATTTTCCCACTGGCTTTCCTTAAAAACTAAACAAAAC
ACAAACACCTTACTGATCTTTAGTAGCTCGTAAGCTGATTTTTAGCCTTTCAGCTGAGAGGAAATG
GTCCAAAAAAAAAAAAAAAAAA

| | |
|---|---|
| Sequence 916 | cMhvSB096f10a2 |

TGATTGGAGCTCCCCGCGGTGGCGGCCGAGGTACATGCATTGGGATTCATCAAGGAAACAAAGCT
GGACCAAAGATGGCTGACTAGAAGCAGTGAGGACTCTTGGCTCTCATGGAGAGAAATGAAAGGG
GCAAGTAAATACAGCAACTTCAACTGAAACATTCATGTTCTCACATTGAGACTGATCAGGGAAAG
AGCTCAACCCATGCAGAAAGGAGAAAAGCAAAGCAGGGCGACAGCCCACTAGGAAGGACATGGA
GCCAAGGGAACCTCTCCCTGCCCAGGCAAACAGTGAATGAATATGTGACCCCTAGCAACCGCACT
TCTTCCATGGACCTTTGCAACTCTTGGGTCAGGAGATCCCCTCATGAATCCACTCCACCAAGACTT
GGTCTGACACACAAAGCTGCATGAAGTCTCTGCTAAGCAACTGCCCAGGGGTGCACAGAGTCCCA
GGAGCTTTACATACTCTGGCCCCAGGATCCCTG

| | |
|---|---|
| Sequence 917 | cMhvSB027a02a2 |

CCCTTAGCGTGGTCGCGGCCGAGGTACTTTTTTTTTTTTTTTTTTTTTTTTNGGGGGNNGGNNNAAA
AAAAANTTTANNNTGGGGAAAAANNNCNAAAAAAACCCCCCANNANNTNNNTTTTTTTTTNAAAA
AAAAANNNNAANNTTTNNNTTTTTTTTNAAAAAAATTTTNCCCCCNGGGGGGNTTAANCCCCAAA
ANTNAANNNNCCNNTTNGNAAANCCCANGGNTTTTTNTTTTTTTNCCCCNNAAATTNNNNNNNCN
NGGNNNGNCNTTTAAAATTTTTTTTTTTTAAAAANNNAAAAANTTNNCCNAAAGGGNTTTTNCCAA
NNNNNNAAAAAAANGGGNTTTTTTTAAAAAAAAANCNTTTTTTTTTTTTTTAAAAAAAAAA

| | |
|---|---|
| Sequence 918 | cMhvSB091a12a2 |

ANCCNCAAAAAAAAAAAAAAAAAAAACCCCCCCNCNCNNNGGGGNNNNNAAAAAAAAAAAAAA
AAAAGGGGNNNGGNGNGNAAAAAAAAANNGGGGGGGGGGGGGGNCCCNCANANNCCCCCCCNN
GAAAAAAAAAAAAAAAAACNCCCCNNGGGGGNNAAAAANNANNNTTTTTTTTTTTTTCCCCCCCC
NGGGGGGGGGGGGGGGNCCCCCNNTTTTTTTTTTTTTTNAAANNNGAAAAACCCCCCCCCCNNAA
AAAA

| | |
|---|---|
| Sequence 919 | cMhvSB030c09a2 |

CCCTTTCGAGCGGCCGCCCGGGCAGGTACGCGGGAATGTCATTATGTGACAAACCAATTTTTTTGT
GCCTCTGTTTCCTCATTTGTGAAAATTGGACTAAATAATCTTTAAGGTCTCTTTTTCTTTTGCAGTTC
TAATATCAGTTCCTTGCGCATTTTATATTCATTTTGAAAAGTAATTTATAAGTATTAGTAACTAGAA
GAACCTTTTATTCTAAAATTTTAATATTTAAAAAAAAACACCCCCCCAAAAAACAAGTTCAATGTG
AGGAGCCAGAATCTATCATTTGTAAGTTAAGGCTAAATACAGATTCTGAATTTGAGGTGCTTTAAG
GAAATGAAAAAAAAAAAAAAAAAAAAA

| | |
|---|---|
| Sequence 920 | cMhvSB049g09a2 |

AGGTACGCGGGGGAAAGTGTGTAGCACCTCCACCTTCTCTCTCTCTCTCCCTCTCCCTCTCCTGCCA
GCCAAGTGAAGACATGCTTACTTCCCCTTCACCTTCCTTCATGATGTTACCATTGGAATGACATACT
GCATCCTATAGTTATACCATCCACTCTGAAATCAATGTGAATTTAACTTCAGTTCCATACAGAAAC
TTCTTTTCCACAGATGGAGTTTAAGCCCAAGCTGGAGTGCGATGGTGCAATCCCAACTCACTGCAA
CCTCTGCCTCCCAGGTTCAAGCTATTTTCCTGGCTTAGCCTCCGGAGTAGCTGGAATTACAGATGTG
CGCCCCCATGACCAGTA

| | |
|---|---|
| Sequence 921 | cMhvSB028g01a2 |

GGTACTGAGCTCCACAAACGTGGCCATGGTTGGTGCGGAAATGATTCTGAGTGAGCAGGTAGAAG
TCTCACGTCCTGCTGTGTCCAGAGTTGGTTCCTTCCAGAGGGTTCGTGGTCTCGCTGGCTTCAAGAA
TGAAGCCCGTGGACCTTCACAGTGTGTGTTACAAGCTGTTAAAGATGTTGTGTCTGGAGTTTGTTC
CTTCAGATGTGTCTGGAGTTTCTCCCTTCTGGTGGGTTTGTGGTGTCCCTGACTT

| | |
|---|---|
| Sequence 922 | cMhvSB101e02a2 |

ACTTTTTTTTTTNGTTTTTTTTNGNNANTACNTCCCNGGNTNGGNAGNGGGNAATTNGCCCCCCTGN
TGCNTTCNTTGNATGNGGNACCCGTTTTTAAGGCTCCNTTTCCGNAATNAAACCNTNATTCCCCNT
NACCCNNGGNNACNATGGTAGGNACGGCAACTACNATCAAAAGTTNATAGGGNAAACTTTCAAA
NGGGTCNTCNCCGCCCCCGCTNACNTGCCNGGGCGGCCGCCCGGNNAGGAACTTTTTTTTTTTTTT
TTTTTTTTTTTTAAANAAAAAAAANCCCNTTTTTTTTTTTTTTTNGGGGNNGGGGGNNAAAAAANTT
TTNGGGGGGGGGGGCCNTTTTTTTTTAAA

| | |
|---|---|
| Sequence 923 | cMhvSB105b12a2 |

CCCCGCGGTGGCGGCCGAGGTACAGGTTTGTAGCCAAAAAGCAATAGGCTATACCATAATAGTGC
ANGTGCGTATAAGGCTTTTACATAAAGGTTTTATGACCTGTATGATGTTNACACAACAACAAAATT
GCCTAGTGGTGCATTTACTATAACATATCCCATCCTTAAGGGACACGTGAATGTATATACACACAC
ACACATATACACATATTACCAAATGGATACATACGTGGTTACCTACAGAAAAATTTAAACTTTGAA
ATAATACTCTTAGGGAATGTTACCTTTTTAAAAGATATTCTTTAAATTTATATTTGCTATTATGTGC
CTTACCAATATTCACATGTAACATTGCCATTTCACTAAGGGATTTTTTATATTAGCATTTTAATCAG
CACATTTGGTGGTCTGTTTACCCTGTGTTATGAGTTA

| | |
|---|---|
| Sequence 924 | cMhvSB090b12a2 |

AAATTCNNTGCGCTACTACCACCTGCTGNACATGGAGTCCCTGGCCNCNCANATNCATGGCGTGG
AGTTTTCGNAGTGGCTGCTGAAAAAACTCAAACCGAACNAAGCGCTNTTCCGCCTGGCCGAGGAA
ACGGGCGTCATCCTGTTGCCNGGCCNNNGCTTNAGGACCACNCATCCGTCCGGCCNTTGTCNCTGG
CCAACCTGAACAAATACCACTATGCCAACATCNNGCCGCNCCATCCGCAACATGGCGTCCGANTT
CTTTGCCGTGTTTGAAAAGGAAAANGGCGGC

| | |
|---|---|
| Sequence 925 | cMhvSB091g07a2 |

GACACGCTTTCCTTGAACTGAAATTTCCCCATAAAGAAAAACCANATTTGGAGTTCGTTCTTGAAA
TGTCCTCACCACAACTGATNAAAACACATCTCCCTTCACATNTGATTCCACCATCTATCTGGAAAG
AAAACTGCAAGATTGTCTATGTGGCCAGAAATCCCAAGGATTGCCTGGTGTCCTACTACCACTTTC
ACAGGATGGCTTCCTTTATGCCTGATCCTCAGAACTTANAGGAATTNTATGAGAAATTCATGTCCC
GGAAAAGTTGTTGGCGGGTCCTGGTTTGACCATGTGAAAGGATGGTGGGCTGCAAAAGACATGCA
CCGGATCCTCTACCTCTTCTACGAGGATATTAAAA

| | |
|---|---|
| Sequence 926 | cMhvSB092g04a2 |

AATTGGAGCTCCCCGCGGTGGCGGCCGAGGTACTGAACTCCACAAACNTGGNCATGGTTGGTGCN
GAAATGATTCTGANTGAGCANGTAAAATTNTCACNTCCTGCTGTGTCCAGAGTTGNTTCCTTCCAA
AGGGTTCNTGGTCTCCCTGGCTTCAAAAATNAANCCGGGGACCTTCTCAGNGTGTGTTACAAGCTG
TTAAANATGTTGTGTCTGGAGTTTGTTCCTTCAAATGTGTCTGGAGTTTCTCCCTTCTGGTGGGTTT
GTGGTGTCTNTGACTTCAAGAATTAACCCGGNGACTGTCGTGGNGATCNTTGTAGCTCTTAAAGGG
GGGNGTGNACCCNNACCAGTGGGCATCAGCANGATTTTTCGTCANGAGGGTAAGAACAAAGTTTC
CACNGTGTGGAAGGGTNTCNTGANCGGTTCCCTGCTCCCNTGTACCTNCCCGGGCGGGCGATCTAA
AACTATTGGNTCCCCCGGGCTAANAAGAATTCNATATNAANCTTATCNATTCCGTNGAANCTTNGA
GGGGGGGGCCCNNCAACCCAGGTTTTTGTTT

| | |
|---|---|
| Sequence 927 | cMhvSB017d09a1 |

CCCTTTCGAGCGGCCGCCCGGNCAGGTACAGTCTCTGCTTCACTCCTGGCTACACAATTGAAAGGC
GCATTGGAGGACTGATTTTCCCTCCTTCCTACATACCTATTTGTTATGNTCAAAAATTAAANTTGAT
CAAATGTACTTTTCATGGTANTAGNGGTTAAAATAACANTGAGTCTTATGNTNCNNTTATTTTATT
GAACTTTATTTNGGTTTTTCTCAAANANTGNTGNTGGATTAATTNAAATTANANNTTGTGNNTATT
NCATNGNTTNTTTTTAACCAGNNTGTAANANGTTCTTTTTANGTGGTAAANNTACNTCTCNACCTTT
AANNCTTTTAATTTTATGTATGTAAACCNAAATTGNGNGTGTNAANAANGGCCTTGGAACCCATTT
AATNGGGTCTTTTAATAGTCCNCAAAANAACCTTCNCTTTGGGTNAGGTTANTNTTCNAAANTTTT
NTTCNCTTTCAAATCCCCANTTTTCTTT

| | |
|---|---|
| Sequence 928 | cMhvSB093f01a2 |

ACTTTTTTTTTTTTTTTTTTTTTTTTNAAAAAATNTTTTTTTTTTTTTTTTTTTTTTTTTTTTTTTTTTTTT
TTTTTTTTTTTTTTTTTTTTTTTTTTTTTTTTAAAAAAAAAAAAATTTTNTANATTTTNCCCCCNNNNC
CCCCCCNTTTTTNNGGGGGGGGGGGGGNNAAANAAAAAAAAAAAAANTNTTTTTNNAAAAAAAA
ANCNNNTTTNNGGGNGNACNCAAAAAAAANNNNNGGGNNAAAAAAAAAAANTTTTTTAAAACNT
TTTTTNCNTCAAAAATTTANNCNNCCCNAAAAAAAAAAAAAACNCNTTTTTTTTTTTAAAAA

| | |
|---|---|
| Sequence 929 | cMhvSB029b06a2 |

CCCTTAGCGTGGTCGCGGCCGAGGTACNCGGGGAGGCCATCTCGCTATAGGAAAGGAAAGTGGAA
CAGCATTCATCCTCAACATTTTTACGAAGACAAAATGAAGACTGGAGTAGAAGACTGATCAGTGC
AGGTGTAGCATAAAAGTGTAATCCTGGAAGATGTGGTGTGAGAAGGTANCACAAGTGAANCAGA
NATACANGANATAGGGAAGGGAAGCTGGAANCANAGGTCACTGGAGGGAGAGGGAGATGGGCA
CATTCAGGGCTACAAAGCAAAGTTCTATGTGATTTACTCACCTCTCAATTGTGGGACCCCTCAAAA
TGTGTACANGTACTCTNCCAGTGACATGCTTNTTGACCACAATGGATGAACTGTGCCCAGCATGCC
CACTTTTCAATGCTNCACTTGATCCCCATGTTT

| | |
|---|---|
| Sequence 930 | cMhvSB091d09a2 |

NGAAACTACTACTGAGGGCNAATTGGAGCTCCCCGCGGTGGCGGCCGAGGTACTTTTTTTTTTTTT
TTTTTTTNNTTTTTTTTTTTTTTTTTTTTTTTTTTTTTTTTTTTTTTTTTTTNTNTTTTTTTTTTTTTTTTTT
TTTTTTTTTTTTTTTAAAAAAAAAAAANNNANTTTTTTTTNNAAAAAANANNNNCNNNNGGGGGGG
NNANNNNNNNNNNNTNNTTAAAAAAAAAAAGGGGGNAGNAAAAAAAAAAAAAANNNNTTTTAA
ANNNGGGGCCCCCCCNNNNNNNTTNNATAAANNNAAAAAAAAAAAAAANNTTTTTTNANCCCCC
CCNGGGGGGGGGNTTTTTTNNNCCCCCCCCCCCNCNNTTNTTNTTATTNAAAAANAAGNGGCCCCC
CCCCCCCNAAAAAAAAAANNAATNTNACTNAAANNNTGGGNCCNCATAAAATAAAAAAAANNNN
NNGCCCCCNCTNNGGANAAAAAAAA

| | |
|---|---|
| Sequence 931 | cMhvSB090f03a2 |

GGGCGAATTGGAGCTCCCCGCGGTGGCGGCCGAGGTACGGGAAGGTGAAAAAAAAAAAAAAAAA
AAANCCCCTTTTTTTTTTTTTTTTTTTTTNNTTTTTTTTTTTTTTTTTTTTTTTTTTTTTTTTTTTTTTTTT
TTTTTTTTTTTTTTTTTTTTTTTTTTCTTTNTCTNNNTTTTTTTTTTTTNTTCTTNTTTTTTTTTTTTTAN
GTANCCNCCCNNCCCGCCCNANNTCNTTTNTTTTNTTNCCNCCCCCCCCCCNANNTNNNTTTCNGG
NGGGGNNTNNCTCNCNCNTNTTNNNCANCNCCNCCCCCNGGGGGGGGGG

| | |
|---|---|
| Sequence 932 | cMhvSB105h05a2 |

AGGTACGCGGGGGTTGTGATGTTTTTTTTTTTTTTAAAAAAAAATCCNAANTTTTTAAAAAAAAAA
AAAAAAAAAAAAACCCCCCCCCCCNNNNAAAAAAAAAANNNCCCCCCCCCCCNNNAAANNAANN
TNNAANNTNNTTNAACCCCCCCCCCCCNGGGGGGGNNCCCCCCCCCNNCTTTTTTTNNTTTNANNA
AANAAAAAANACCCCCCCCCCAAAAAAAA

| | |
|---|---|
| Sequence 933 | cMhvSB005h07 |

GATATCTGCAGAATTCGCCCTTAGCGTGGTCGCGGCCCGAGGTACTTTTTTTTTTTTTNTTTTATAN
TNGTTNGGGGTCTTATATGCGCTATGAATATGAATATGACAGCTTCACGGCTCCAACGTAATTATA
GAAAATAAAAATAATATGACATTACTTTGGCAGGCAGGCATACATTTTCATTTAATATGACACAAT
AAGATTACTACTTTCTCCCAAAAGTTAACTCCTATTGCCAATAAAAACTTACTTCTAGTTCTTTAAT
TTTTTCTTCTGCTATTTTC

| | |
|---|---|
| Sequence 934 | cMhvSB008d06 |

CCCTTTCGAGCGGCCCGCCCGGGCAGGTACTGGGATTACAGGTGTGAGCCACCATGCCTGGCCTGT
AAAACTCACTTTCAATACCAGGGATAAGAGGAGGGGCTAAGTGAAGAAGAAATTACTTGAAAAGC
CTAAGAAAACCAGATCTATGCTTACTGCAAAACTTAATTCTGAAAATGTTTTAGTAATTAAATCTG
GCTGTTCAGTTGAGAGAAGAATATGAAACGATGAGGAGTCTCTGAATTTGGAATCTACACAGAAT
GGTGGATTTAGAAGCATAATAGAAATCAGTGCATCTTATTAGCTGCCTTGGTTCTTTGATTGTTTTC
TTCGGGTTCCAAGAATTTTTAGGATCTGAAAATCACGACAAACCAAAACAGAGAGAGATAAATCT
GTGCAGAAAACATCAAATCTATGGCCACCCGCGTACCTCGGCCGCGACCACGCTAAGGG

| | |
|---|---|
| Sequence 935 | cMhvSB012b09 |

CCCTTTCGAGCGGCCGCCCGGGCAGGTACAAGGCATGATGAGTCCTTTTGCTTTTAGGCTTTTGAC
TTCTGGTTTTAGACTTTCTTTAGCTTCTGTTGTTAGACAACATTGTGTAAGCTTGGTTTTTATAAGTT
TGCATGGATTAAACTGAACTTAATGAAATTGTCCCTCCCCCCAAATTCTCAGCACAATTTTTAGGC
CCACAAGGAGTCAAGCACCTCAAGGAGATCTTCAGTTTGAACTTGGTGTAAGACACAGGGATACT
GATGAATCAATATTCAAATTAGCTGTTACCTACTTAAGAAAGAGAGGAGACCTTGGGGATTTCGA
GGAAGGGTTCCGTAAGGGAGATTTTAGCTGAGAAATACCATTTGCACAGTCAATCACTTCTGACCA
AAGTTATCAGAAAAAGGAGAAAAAG

| | |
|---|---|
| Sequence 936 | cMhvSB016a08 |

CCCTTTCGAGCGGCGCCCGGGCAGGTACGCGGGGGCCATAGTGAAGAAGGAACTGCTGTCTGTGG
TGGCTGGGGGAGACAACTACAGGGTCAATAACAAGCACGATGACAGATACACACCACTGCCTTCC
AACAAAATCGTCAAGCGGGCAGAGGAGTTGGTGGGGCAGGAGTTGCCTTATTCGCTGACCAGTGA
CAACTGCGAGCACTTCGTGAACCATCTGCGCTATGGCGTCTCCCGCAGTGACCAGGTCACTGGTGC
AGTCACGACAGTAGGTGTGGCAGCAGGCCTGCTGGCTGCCGCAAGCCTTGTGGGGGATCCTGCTT
GGCCAGAAAGCAAGCGGGAAAGGCAATAAATCCAAGAAATTGTNCCAACAACCACCAATTCTTAC
NGAGGAATATTATTTAACCAGCAAGGAGTGGAGGTTTGGTTTACTGATTTTACTGNTTTGGGNTCA
TGAAATTTTATTTTAATGGGAGTTAAAAACACAGGAAAATGTATTTNGAAATGCAACTTAATATTG
AATTTTTTAAAAGACACAATTNGGCTTTTGGAAA

| | |
|---|---|
| Sequence 937 | cMhvSB018h05 |

CCCTTTCGAGCGGCCGCCCGGGCAGGTACTGGATCAGTTTCTCCTGCGTGAGGTATGGGTGACACT
CAACCTGCANCANCAAACAATCCTCATCACGGGGAAAGCCGGCTCTGTTTTGCATTGTTCCTAGGG
AGTTCTGGTTAAGTCACTGGTTTATATTTCAAGTCCAGGTTTGTTCAAGAGCCTCTCGATCTGGAAG
TGGTTGAAATTTGAGACCCCAAGGGCTTTCACCAGCCCCTCGTCCACCAGCTCCTCCATGGCCTCC
AGGCATCCAAGAACGTTCCTTTTCCACTGATCATATTACCTTTATCATCTTTGGGGAAAAAGTCATC
CCCAAGTCTTGAATCCCTGTGGCCAAGTGAAATAAGATAGACGTTCAGATAGCCCAGCTTCANGTC
CTTGAGGGTCTTCTTCAAANGCTTTCCTCACAAAGGGGTCTCTCAAAAGAAAGTGGGCCACACCTT
GCTGACGATGAACAAGGTCCTNCCGCATNAAAACCCTTCTTTGGGATCCTTTTCTTGGATGGCTTCT
TCCCACCTCATGTTGAATTCTNATAAAAATAGGGCNCAGTCNAATGTNGCGATATTCTTGCATTNA
ATNGGCCACCTTTACCGGTTTTTTTTA

| | |
|---|---|
| Sequence 938 | cMhvSB020g05 |

CCCTTAGCGTGGTCGCGGCCGAGGTACGCGGGGAGGGAACCGCTCAGATACCCTTCCACACCGTG
GAAACTTTGTTCTTACCCTNTTGACAAAAAATCTTGCTGCTGCTCACTCTTTGGGTCCACACCACCT
TTAAGAGCTACAACGATCACCACGACAGTCTGCGGCTTCATTCTTGAAGTCAGCGACACCACAAAC
CCACCAGAAGGGAGAAACTCCANACACATCTGAAGGAACAAACTCCAGACACAACATCTTTAACA
GCTGTAACACACACTGTGAAGGTCCACGGCTTCATTCTTGAAGCCAGCGAGACCACGAACCCTTTG
GAAGGAACCAACTCTGGACACAAGCAAGACCGTGAGACTTCTACCTGCTCACTCAAAATCATTTCC
G

| | |
|---|---|
| Sequence 939 | cMhvSB023a03 |

CCCTTAGCGTGGTCGCGGCCGAGGTCGGCCGAGGTACAAAAGCCAAGATGCCCATTGTGGGCCTG
GGCACTTGGAGGTCTCTTCTCGGCAAAGTGAAAGAAGCGGTGAAGGTGGCCATTGATGCAGAATA
TCGCCACATTGACTGTGCCTATTTCTATGAGAATCAACATGAGGTGGGAGAAGCCATCCAAGNAG
AAGATCCAAGAGAAGGCTGTGATGCGGGAGGACCTGTTCATCGTCAGCAAGGTTGTGGCCCCACT
TTCTTTGAGAGACCCCCTTTGTGAGGAAAGCCCTTTTGAGAAAGACCCTTCAAGGGACTTGNAANC
TGNNCCTATCTGGAACCNTTCTATCTTTATTCACTTGGCCACAAGGGGGATTTCAAGNACTGGGGG
GGATNGGACTTTTTT

| | |
|---|---|
| Sequence 940 | cMhvSB023a03 |

CCCTTAGCGTGGTCGCGGCCGAGGTCGGCCGAGGTACAAAAGCCAAGATGCCCATTGTGGGCCTG
GGCACTTGGAGGTCTCTTCTCGGCAAAGTGAAAGAAGCGGTGAAGGTGGCCATTGATGCAGAATA
TCGCCACATTGACTGTGCCTATTTCTATGAGAATCAACATGAGGTGGGAGAAGCCATCCAAGNAG
AAGATCCAAGAGAAGGCTGTGATGCGGGAGGACCTGTTCATCGTCAGCAAGGTTGTGGCCCCACT
TTCTTTGAGAGACCCCCTTTGTGAGGAAAGCCCTTTTGAGAAAGACCCTTCAAGGGACTTGNAANC
TGNNCCTATCTGGAACCNTTCTATCTTTATTCACTTGGCCACAAGGGGGATTTCAAGNACTGGGGG
GGATNGGACTTTTTT

| | |
|---|---|
| Sequence 941 | cMhvSB027e12 |

CCCTTAGCGTGGTCGCGGCCGAGGTACCCTGCGCTGGCTCCGTGAACCTTAGGGACAACACCGGG
ACACCCGCGAGGCCGGAAAATGGACTCAGTGGCTTTTGAGGATGTGTCTGTGAGCTTCAGCCAGG
AGGAGTGGGCTCTGCTGGCTCCTTCACAGAAGAAACTCTACAGAGATGTGATGCAGGAAACATTC
AAGAACCTGGCATCTATAGGGGAAAAATGGGAAGACCCGAATGTTGAAGATCAACACAAAAACC
AAGGACGAAATCTAAGAAGCCATACGGGAGAGAGACTCTGTGAAGGTAAAGAAGGTAGTCAATG
TGCAGAAAACTTCAGTCCCAATCTCAGTGTGACGAAGAAGACTGCCGGAGTAAAACCATATGAGT
GTACCTGCCCGGGCGGCCGCTCGAAAGGGCGAA

| | |
|---|---|
| Sequence 942 | cMhvSB028b02 |

CCCTTTCGAGCGGCCGCCCGGGCAGGTACANNNGNNCAGATNCCNNTTNTGGGCCNGNGCACTNT
ANNGTCTNTTCTTGGNAAANTNNAAGNCTCCCNTANNGACNCCATTNNNCCGGAATATCACCNCA
TTGACTCGGCCTATATCTNTGAGAANCANCTTCNACATGGCAAAANCCCTCCAAGACACACATNCT
TACACNACTCTCNACATNCCGGAAGGNACCTGCTAATCGTCANCAAGGTGTGGCCCACTTTCTTTG
AGAGACCCCTNNTGANGAANGCCTTTGAGAAACCCTCGGGACCTGAAGCTGAGCTATCTGGACGT
CTATCTTATTCACTGGCCACAGGGATTCAAGACTGGGGATGACTTTTTCCCCAAAGATGATAAAGG
TAATATGATCAGTGGAAAAGGAACCTTCTTGG

| | |
|---|---|
| Sequence 943 | cMhvSB034g12 |

CCCTTTCGAGCGGCCGCCCGGGCAGGTACTGGTGAACTCCCTCACTTGAATTTCTCGTTCTTATGAA
GGTGCTTTCTTGCTTGGATAGTTGTTCAGTGTGACATTCCTGCAGGGTGAACAATTGCTAGAGGGT
TCTATTCAGCCATCTTTCTCCACCTCACATCCATGTTTTTGCATGTTATTTCTTTCCTTTTATTGATTA
GCATTTGATTCCATGAATATAGCACAATGTATATAACCACTATTCTTTTCTGGAAAACTTATGTCCA
GGTTGGGGTTATTATGAATAAGGCTATGAAATTTCAGGTACCTCGGCCGCGACCACGCTAAGGG

| | |
|---|---|
| Sequence 944 | cMhvSB038d05 |

CCCTTAGCGTGGTCGCGGCCGAGGTACAAATCTGTTGCCAGCCTGAACACACCTGTAGGAGGTGG
ATGGAGACCCTGGTTGAGAGGTCTCACCCAGCCAGTAGAAACAGGATCAGGGACCTGCTTGAAGA
AGCAGTCTAGCCCCACTTTTGTAGAACAACTGAGCTGTGCTGGGATACCATTTCTGCCCCTCATGG
TGTTGGGTTCTCCAAAACCTGGAAGCTGGAACGGCTAAATTGCAGAAACAGCAAAGATGGCAGCC
TGCCCCTCTCTCTAGTAACTCTGTCCCAGGATGCTTTCAAACCCTTGTCAACCAGAGAACATCAGT
GGGAGAGGCTGAAGACCCTGGTTGGGAAGTTCTCCCAAGTGAGGAGGAACAGATCAGGGACCTGC
TTAAAGAAGCGGTCTTGCCACGCTTTTGTAGAGCAGTTGTGTCATGCTGGGGTACCTGCCCGGGC

| | |
|---|---|
| Sequence 945 | cMhvSB041a06 |

ACAAAAGCCAAGATGCCCATTGTGGGCCTGGGCACTTGGAGGTCTCTTCTCGNCAAAGTTGANNG
AAGCGGTTGAAGGTGGCCATTGATGCAGAATATCGGCCACATTGACTGTGCCTATTTCTATGAGAA
TCAACATGAGGTGGGAGAAGCCATCCAAGAGAAGATCCAAGAGAAGGCTGTGATGCGGGAGGAC
CTGTTCATCGTCAGNAAGGTGTGGCCCACTTTCTTTGAGAGACCCCTTGTGGAGGNAAAGCCTTTG
AGAAGACCCTCAAGGGACCNTGGAAGCTTGAAGCCTATCTGGGACCGTCTATTCTTAATTCACTTG
GCCCACCAGGGGATTTCAAGGACCTGGGGGGATTGACCTTTTTCCCCAAAGGATGGATTAAAAGG
GTAAATTATGGATCAGGTGGNAAAAAGGGAACCGTTNCTTGGGATGCCTGGGNAGGNCCATGGGA
GGGAGCTTGGTGGGGACCGAAGGGGGCTTGGGTGNAAAGCCCCTTGGGGGTCTTCAAAATTTCAA
CCCCACTTCCAGNATCCGAAGAGGCTCTTTGAACCAAAACCTGGACTGGAAATATAANACCCAGT
GGACTAACCCAGGTTTGAGTGGTCACCCATTCCTTAACGCCAGGAAGAAAACCTTGATCCAAGTTN
CCCTTCCGGGCCCGCCTCNTANNAACTTAGGTGGGAATNCCCCCCGGGGGCTTGCCANGGAAATTC
CNNATTATCCAAAGCCTTTATCCGGATTNCCCGGCCCGAACCTTCCGGANGGGGGGGGG

| | |
|---|---|
| Sequence 946 | cMhvSB042c03 |

TCCACCGCGGTGGCGGCCGAGGTACAGTGGGAGAGTGAGGTGGGAGAAGAAGAGTGTCTGGTAG
GTGTGCTCACTGTCTTCTTGGCTGAGAATGTTNAATTGGAAGAGTGGGCCGCTCAGAGCTCCTACA
AAGGCAGAGCAAAGCTTCTTAGCTGACATTGTTTGAGAAATTGTTGGCAGGCTCTGGAATGCTTGT
TTGGCTTTCTTGCGGTGCCTTTGGTGTCTTGTTTTTCTTCACATTGCCCTTGAAATGATCACAGGGG
GCACTGCTTCTTTGGCAGCCCANACACTGTCATGAATTTTTCTTCTCGGGGCTCCTCAANGAACCA
AATCTTTTGCACCTCACATTTCTTGGGCCCGCCTTTNCTGGGGAAGCCATCCTCCTTAGAAGCCTGG
CCCTCGGTCCCCTTGTGGGGNCTNTTGGCCGACCCCCCTTGGGAATNTTCAGGGCTGCTTAGAAGA
ACCCATTGGGACCATTCAAGCCATTTAAGTTGGGCAAGNCAAACCAGGGGAAGGGAAGGGGGAA
ANNANNATTTTNAGAAAACCTTTTTCA

| | |
|---|---|
| Sequence 947 | cMhvSB042e02 |

TGGGCCGGGAGGCAGTGCTGATCCGGCTGCTCCTCCAGCCCTTCAGACGAGATCCTGTTTCAGCTA
AATGCAGGGAAACTCAATGTTTTTTTAAGTTTTGTTTTCCCTTTAAAGCCTTTTTTTAGGCCACATT
GACAGTGGTGGGCGGGGAGAAGATAGGGAACACTCATCCCTGGTCGTCTATCCCAGTGTGTGTTTT
AACATTTCACAGCCCANGAACCCACAGATGTGTCTGGGAGAGCCTGGCAAGGCATTCCTCATCAC
CATCGTTGTTTGCAAAAGGTTTAAAACAAAAACAAAAAAAACCACNTCTGNAAAAANANATNNGN
TTATATTATAGAATNNNAGTTTCCCTTTNGGGNCCCGGCTTCTTANGAAACCTANGGTGGNNATTC
CCCCCCCGGGGGCCTGGCCAAGGGGAAATTTCCGAATTNTTCCAAAGGCCTTTTATTTCGGAATTN
NCCCCGGTNCGNACCCCTTCNGNNAGGGGGGGGGGGGGGCCCCCCGGGGTANCCCCCAAGCCTTT
TTTTGGTTTCCCCCNTTTTAAAGGTGGGNGGGGGG

| | |
|---|---|
| Sequence 948 | cMhvSB042e11 |

NCCTGNCAGGTACTGTNCTCNACAAACGNGGGNATNNTNGGAGCTNAATTGNGTTAAGACATCAG
GCTCCANATATGAACTTTCAGCANAAGCGCTTGCCGGGAGCAAAGGGACAGAAAAGCTGANATGA
ACAGTGCCTGGCAACAATCACAGCCGGGCAAGGGNGCTCCGAGCCTCGCATCCCC

| | |
|---|---|
| Sequence 949 | cMhvSB042e11 |

TCGAGGGGGGGGCCCCGGGTANCCCANNNTTTTTGTATCCCTTTTTANGNGGAGGGGTTAAATTTG
CGCCGCTTGGCCGTTAATCAATGGTCATTANCTGGTTTTCCTTGGTGTGGAAAATTGTTTATTCCCG
CTCACAAATTCCACCACCAAANATTACGAAGCCCGGGGAAGCATAAAAAGNTGGTAAAAAGCCCT
GGGGG

| | |
|---|---|
| Sequence 950 | cMhvSB044c01 |

CTNCCTGAGGGCGAATTGGAGCTCCCCGCGGTGGCGGCCGAGGTACTGATTGGGGAAGTGATAAA
TGTTCATGAAATCTTCACAATTTATGTTCAGAGATTGCAGTAAAGACAGGCGTAAGAAATTATAAA
AATATTAATGTGGGGAATTAAGAAATGTCCATGAAATCTTCACAATTTATGTTCTTCTGCCATGGC
TTCAGCCAGTCTCTCTGTTGGGGGTCCCTGAATTCCTGCAACAGCTCAGAAACTAGAGGCTGAGAA
AGGGAGTCACTCAAACCTTGAATCCCTGTGGCCAGTGAATAAGATAGACGTCCAGATAGCTCAGC
TTCAGGTCCTTGAGGGTCTTCTCAAAGGCTTTCCTCACAAGGGGTCTCTCAAAGAAAGT

| | |
|---|---|
| Sequence 951 | cMhvSB044c06 |

CCGGGCAGGTACGCGGGGACAGCTGGGAGGACACCCACATGGTCGGCGTGCAGGATATTTCGCTG
GACCCTAGAAAAGCCACCACGACCTGTGGGCCATGATGCTACCCCAATGGCTGCTGCTGCTGTTCC
TTCTCTTCTCCTTTCTCTTCCTCCTCACCAGGGGCTCACTTTCTCCAACAAAATACAACCTTTTGTCC
CCTCCAGGCATCCACCGTCTGCACAGACTTACCCCGGCCCCCACGTAGAGACCACCCTGCCTGGCA
GGAGCCAGAGGAGCTCAAGGAGTCTTGCATCCGGAACCAGGACTGCGAGACTGGCTGCTGCCAAC
GTGCTC

| | |
|---|---|
| Sequence 952 | cMhvSB045d05 |

TTTGAGAAGCCAGCGCTCACCCACCCGGGGTCTCTGTGCATTGACCTTTGGGTGCTGACTTGGAGA
AAAGCACAAACACGACCAGTCCCATCCTGGCTCCCGTGGGGCTTCTTCTATCTACGCATTGTATCG
ACTGCATTAGTTGGACTAAGATGATGACTCAGTTAAAGGAGGAGACAAATGCTGACTGTCTAAGC
AAGAATGGCCCAAGCTGGCAAGAAAAAGCACACTGCATACATAGGATACAGAAGGGGCAGGAGC
TTCTGCCTGCCGGGATCTGCAACCATTTACATTTTGTTTTGCCTGCAAAACCTATNAAGNAAGGGA
TTTCCTGTTTGGCCCAGGGGAGTCTTCCACTGGAACAAACAAAAATGGGCAGTTCAAAAAGGTTCT
TGGAGGTGGTCCCTTATTCCAAGCCAGCCCAGGAGTCCCTTCATCCGTCATNCCACGGGGAAGAGT
CTTTTGAGGGGGAAACATGGAAGTCCANGCTCATGCCTCTGCCTATGGGGTNCAATTTCTTTCGGG
GAATCACNTGTGGATCATGGATATNTTTCATTAACCCCCTTGCGGGACCCACCNATGGTTTTCAAG
GGGTGGCTTTTTNCCCCCTTTTT

| | |
|---|---|
| Sequence 953 | cMhvSB045d08 |

TTGTCAGCTGTGAGCGTTGCGGGGCTGGTGGGGTGTGTTTGAGTATGTAAGTGTCTATTTCCTGTGC
TCTAACAGTGACTATTTCAGTTCTAACCCTTCAATTGCTAATTGGATGGGGGAATGGCCTCTTAGAT
TGTCCTTGTTTTGACTTATCTGCTAAGGCGAGAGAATGTCTGGGTTTGCCACACAGTCCCGCAGGG
ACCCCTGCTCTTTGCCAGGATTTTTATATCAAGTACCT

| | |
|---|---|
| Sequence 954 | cMhvSB045d08 |

ATTCCGATATCAAGCTTATCGGATACTCGTACGACCCTCGGAGGNGNGGGGGCCCGGGATACCCC
AGCNTTTTTGTTTCCNTTTTAANTGGAGGGGTTTAAATTGCCGCCGCCTTGGNCGTTAAATTCATGG
GTTCATAGCCTGTTTCCTGTGTGGAAAATTGTTAATCCCGGCTCACAAATTNCACACNAAACNATA
ANGAAGCCNCGGGGGAGGCAATAAAAGGTGGTAAAAAGANCCTGGCGNNTGCCCCTAAATNGAA
NTTNNAANCTAAAGNTTNAANCATTGTCAAATTTGNCNGTTTGGCCGCCTTCAACTTGGNCCCCGC
TTTTTTNCANGTCNGGGGGGAAA

| | |
|---|---|
| Sequence 955 | cMhvSB045f05 |

ATGGGCGAATTGGACTCCACCGCGGTGGCGGCCGTCGCCATGGTGAANCTGAGCAAAGAGGCCAA
GCAGAGACTACAGCAGCTCTTCAAGGGGAGCCAGTTTGCCATTCGCTGGGGCTTTATCCCTCTTGT
GATTTACCTGGGATTTAAGAGGGGTGCAGATCCCGGAATGCCTGAACCAACTGTTTTGAGCCTACT
TTGGGGATAAAGGATTATTTGGTCTTCTGGATTTGGAGGCAATCAGCGGACAGCATGGAAGATGT
GTGCTCTGGCTCGGATAAGAGATGGGNCATCATTCAGTCACCTAGTTGGGATGGCACCAAGGCTCT
TCACAGNACGCATNTGTTAGCNAGCAGTGGGCAACTTGGTACCTCGGCCCGCTCTANTAACCTAGG
TGGGATCCCCCGGGCCTGCAAGGNAATTCGATATCAAGCCTTTATCCGATACCCGTGCGACCTCNA
GGGGGGGGGGCCCGGTACCCCAGCTTTTTGTTCCCCTTTAGTGAGGGGTTTAAATTGGCGCCGCTT
GGCGTAATCATGGGTCAATAAGCTGGAATCCTGTGTGGAAATTGNTTATTCCCGCTCA

| | |
|---|---|
| Sequence 956 | cMhvSB046a03 |

AGGTACAAAAGCCAAGATGCCCATTGTGGGCCTGGGCACTTGGAGGNCTCTTCTCGGCAAAGTGA
AAGAAGCGGTGAAGGTGGCCATTGATGCAGAATATCGCCACATTGACTGTGCCTATTTCTATGAGA
ATCAACATGAGGTGGGAGAAGCCATCCAAGAGAAGATCCAAGAGAAGGCTGTGATGCGGGAGGA
CCTGTTCATCGTCAGCAAGGTGTGGCCCACTTTCTTTGAGAGACCCCTTGTGAGGAAAGCCTTTGA
GAAGACCCTCAAGGGACCTGAAAGCTGAGCCTATCCTGGGACGTCTATCTTATTTCACTTGGCCAC
AGGGGATTCAAGGACTGGGGGATGGACTTTTTCCCCAAAAGATGATAAAAGGTNAAATATNGATC
CAGTGGGAAAAAGGGAACCGTTCTTGGGATGCCCTGGGGGAGGCCCATGGGGAGGGAGCTGGTG
GGACCGAAGGGGGCCTGGTTGAAAAGCCCCTTTGGGGTTCTTCAAAATTTTCAACCCACTTTTCCA
GGAATCCGAAGAGGGGCTCTTTTGAAACAAAAACCCTTGGGACTTGGAAAATTATTAAAAACCCA
AGTGGACCTTNAACCCCAGGGNTTTGGAAGTTGGTTCCACCCCCCATTACCCTTTCACCGGCCAAG
GGAAGGAAAAACCTTGGATTCCCCAGGTTACCCTTTGGCCCCCGGGGGGGCCGGGGCCGCCTTCTT
AAAAAACTNAGATGGGAATCCCCCCCCGGGGCCTTGCCAGNGGAAATTNCGGATNATNAAAGNCT
TTNTCTGAATTACCCNGNCGGAANCNTTNGNNGGGGGGGGGGGC

| | |
|---|---|
| Sequence 957 | cMhvSB046c07 |

GGCGGCCGAGGTACAAAGTGTGAGGTAGGCCACCCAGAAACACCAACTCCGAAGAAATGGAGTC
AGTTTTCCGAAGTAGGGAGTGAAGGCTTCATTTATGTGGGCTGAGACAGTGGAGTTTTTAGCAGGA
TTACAACATTATTCATACAAGGTTGGTGTGTATGTTATAGCAATTTGATTGGCTCTAGGTGATGTTT
CTTTTTGGGGAGGGGATATTTAACATTTTCTTAACAGAGGGTGTAATAAGTCCTGGGTTTTCTTTCA
CCTGGTCTAAGCGAAGCAGGGCAATGAAGGGGGAGTTAATCTACAACAAGGGTCATTAATTCAGA
GGGCGGGAGGCTTTTGACCCTGACATGGTTTCCCTTTAGTCAATGTACCTGCCCGGGCGGC

| | |
|---|---|
| Sequence 958 | cMhvSB047f10 |

AGGTACGCGGGAGCAGGGAACTGCTCAGATACCCTTCCACACCGTGGAAACTTTGTTCTTACCCTC
TTGACGAAAAATCTTGCTGCTGCTCACTCTTTGGGTCCACACCACCTTTAAGAGCTACAACGATCA
TCACGACAGTCTGCGGCTTCATTCTTGAAGTCAGCGACACCCCAAACCCACCAGAAGGGAGAAAC
TCCAGGCACATCTGAAGGAACAAACTCCAGACACAACATCTTTAACAGCTGTAACACACACTGTG
AAGGTCCACGGCTTCATTCTTGAAGCCAGCGAGACCACGAACCCTCTGGAAGGAACCAACTCTGG
ACACAGCAGGACGTGAGACTTCTACCTGCTCACTCAGAATCATTTCCGCACCAACCATGGCCACGT
TTGTGGAGCTCAGTACAAAAGCCAAGATGCCCATTGTGGGCCTGGG

| | |
|---|---|
| Sequence 959 | cMhvSB048g07 |

AGGTACAAAAGCCAAGATGCCCATTGTGGGCCTGGGCACTTGGAGGTCTCTTCTCNNNAAANNNA
AAGTTTANCGNNCGCCCGGGCAGGTACTGGATCAGTTTCTCCTGCGTGAGGTATGGNTGACACTCA
ACCTGGNTAGTCACTGGTTTATATTTCANTCCAGGTTTGNTCAANAGCCTCTCGATCTGGAAGTGG
TTGAAATTTGANACCCCAANGGCTTTCACCAGCCCCTCGTCCACCANCTCCTCCATGGCCTCCCAG
GCATCCAAGAACGTTCCTTTTCCACTTGATCATATTACCTT

| | |
|---|---|
| Sequence 960 | cMhvSB051a06 |

GGCCCGNCCGGGCAGGTACANANGCCAAGATGCCCATTGTGGGCCTGGGCACTTGGAGGTCTCTT
CTCGGCAAAGTGAAAGAAGCGGTGAAGGTGGCCATTGATGCANAATATCGCCACATTGACTGTGC
CTATTTCTATGAGAATCAACATGAGGTGGGAGAAGCCATCCAAGAGAAGATCCAAGAGAAGGCTG
TGATGCGGGAGGACCTGTTCATCNTCAGCAAGGTGTGGCCCACTTTNTTTGAGAGACCCCTTGTGA
GGAAAGCCTTTGAAGAAGACCCTCAAGGACCTGAAAGCTGAAGCTATCTGGGACGTCTTATTCTTT
ATTCACTGGCCCACAGGGATTCAAAGACTGGGGGGATGACTTTTTCCCCAAAAGATGATAAAAGG
GTNATTATTGGATTCAGTGGGAAAAAAGGGAACCGTTTCTTGGGATTGCCCTGGGGAGGCCCATG
GAAGGAGCCTGGTGGGACNAAGGGGCTTGGTTGGAAAAGCCCCTTTGGGGGTNCTCAAAATTTTN
AACCCACTTTCCAGAATCCGAAGANGGCTTCTTNGAAACAAAACCTTGGGANCTGGAAAATATAA
AACCCAGTGGACTTAACCCAGGGTTGGAGTTGTTACCCCATTACCCTTTACGCCAGGGAANAAAAC
TGGATNCCAAGTTACCCTTCNGGNCCGCTTCTTNANAACTTTGTNGGGATTNCCCCCCGGGGCCTG
GGAGGGGAAATTTCGATTNTTNAAAGGCCTTATTCGNTANCCCCGTCGGACCCCTCCTANGGGGG
GGGGG

| | |
|---|---|
| Sequence 961 | cMhvSB054d05 |

NANCTCCACCGCGGTGGCTGACGGATGAGGACTCTGGGCTGCTGGAATAGGACACTCAAGACTTT
TGGCTGCCATTTTGTTTGTTCAGTGGAGACTCCCTGGCCAACAGAATCCTTCTTGATAGTTTGCAGG
CAAAACAAATGTAATGTTGCAGATCCGCAGGCAGAAGCTCTGCCCTTCTGTATCCTATGTATGCAG
NGTGCTTTTTCTTGCCAGCTTGGGCCATTCTTGCTTAGACAGTCAGCATTTGTCTCCTCCTTTAACTG
AGTCATCATCTTAAGTCCAACTAATGCAGTCGATACAAATGCCGTAGATAGGAAGGAAGCCCCAC
GGGGGAGCCAGGGATGGGACTTGGTCCGTGTTTGTGCTTTTCTCCAAGTCAGCACCCAAAGGTCAA
TGCACAGAAGACCCCCGGGTGGGGTNGAAGCCGCTGGCTTCTTCAAAACCGGCNCGCTCTTAGGA
ACTAAGTNGGGATCCCCCGGGGGCTTGGCAGGGAATTCGATAATCAAAGNCTTATCCGATNCCCG
TNCGACCCTNGGAGGGGGGGGCCCGGGNACCCCANCTTTTTGGGTCCCTTTAAGTG

| | |
|---|---|
| Sequence 962 | cMhvSB057c03 |

CCGGGCAGGTACGCGGGGAGCAGGGAACTCGCTCAGATACCCTTCCACACCGTGGAAACTTTGTT
CTTACCCTCTTGACGAAAAATCTTGCTGCTGCTCACTCTTTGGGTCCACACCACCTTTAAGAGCTAC
AACGATCACCACGACAGTCTGCGGCTTCATTCTTGAAGTCAGCGACACCACAAACCCACCAGAAG
GGAGAAACTCCANACACATCTGAAGGAACAAACTCCAGACACAACATCTTTAACAGCTGTAACAC
ACACTTGTGAAGGGTTCCACCGGCTTTCATTTCTTGGAAGCCAGNCGGAGACCCACCGAACCCTTN
TGGGAAAGGGAACCAACTTCTTGGGACACAGGCANGGGACGTTGAANACTTTCTACCTGCTNACT
TCAGAAATNAATTTTCCGGCACCCAACCCCATTGGGCCACGTTTTNGTGNGGAGCTTCAGTACCAA
AAAGCCAAGGATTGCCCCATTTGTTGGGCCCTGGGCCACTTTGGGAGGGTCTCCTTCTTTCGGGNA
AAAANATGGAAAAANAAANCCGGGTGGAAAAGGTG

| | |
|---|---|
| Sequence 963 | cMhvSB060b04 |

AGGTACTTTCTACACAGAACCAAGTAAAGAGAAGGAGGCCGGAACTACACCAGCAAAAGACTGG
ACCCTTGTCGAAACTCCTCCTGGGGAGGAACAAGCCAAGCAGAATGCCAACTCCCAGCTGTCCAT
CTTGTTCATTGAAAAACCTCAAGGAGGAACAGTGAAAGTTGGTGAAGATATCACCTTCATAGCCA
AAGTCAAGGCTGAAGATCTTNTGAGAAAACCCACTATCAAATGGTTCAAAGGAAAATGGATGGAC
CTGGCCAGCAAAGCCGGGAAGCACCTTCAGCTGAAAGGAAACCTTTTGAGAGGCACAGTCGGGTG
TTACCTTGCCCGGGCGGC

| | |
|---|---|
| Sequence 964 | cMhvSB060b04 |

GCTGCAGGAATTTCGGATATTCAAAGCTTTATCGATTACCCGGTCCGACCTCGAAGGGGGGGGCCC
CGGTACCCCANCTTTTGTTCC

| | |
|---|---|
| Sequence 965 | cMhvSB075a08 |

AATTGGAGCTCCCCGCGGTGGCGGCCGATGTACAANTACCGGAATGCCCNTTNTGGGCNAGNNCA
CTNNNAGGCNTATNNTTNCCGAAGANCTNGANGNGGGGNCCGTGGCCCTTGATGCAGAANCTTTA
CNCATTGGCTGTNCCTCTNCTTGTCNTAATCATNGTNATGTGNGANAACNNATCCAAGAGAAGATC
CAAGAGAAGGCTGTGATGCGGGAGGACCTGTTCATCGTCAGCAAGGTGTGGCCCACTTTCTTTGAG
AGACCCCTTGTGAGGAAAGCCTTTGAGAAGACCCTCAAGGACCTGAAGCTGAGCTATCTGGACGT
CTATCTTATTCACTGGCCCAGGGATTCAAGACTGGGGATGACTTTTTCCCCAAAGATGATAAAGGT
AATATGATCAGTGGAAAAGGAACGTTCTTG

| | |
|---|---|
| Sequence 966 | cMhvSB075a10 |

AGGGCGAATTGGAGCTCCCCGCGGTGGCGGCCCGANGTACTGATCTCCACAAACGTGGCCNTGGT
NGGTGCGGAAATGATNNTNAGTGANCNGGTAAAANTCTCACGTNCTGCTGTGNCCAGAGTTGGTT
CCTTNCAGAGGGNTCGNGGTCTCCCTNGCTTCAANAATNAAGCCTTGGACCTTCACAGTGTGTGTT
ACAGCTGTTAAAGATGTTGTGTCTGGAGTTTGTTCCTTCAGATGTGTCTGGAGTTTCTCCCTTCT

| | |
|---|---|
| Sequence 967 | cMhvSB082f05 |

CATNACATNCNNCTATTGGATCTTCTNTNGNATGGNNNTTCCNACNTAATGTTNATTNTNNTAGAA
ATNNGCACNGGNNNNGNGGCNANNTTCTGCATCAATGNCCACCTANGCCGATTNTTTCACTTNGC
CNANAANAGACCTTNAANTGCCCATGCCCACAATGGGCATCTTGGCTTTTGTACCT

| | |
|---|---|
| Sequence 968 | cMhvSB083a12 |

AAGCTCCACAAACGTGGTNATGGTTGGTGCGGAAATGATTCTGAGTGAGCAGGTAGAAGTCTCAC
GTCCTGCTGTGTCCAGAGTTGGTTCCTTCCAGAGGGTTCGTGGTCTCGCTGGCTTCA

| | |
|---|---|
| Sequence 969 | cMhvSB083a12 |

AAGCTCCACAAACGTGGTNATGGTTGGTGCGGAAATGATTCTGAGTGAGCAGGTAGAAGTCTCAC
GTCCTGCTGTGTCCAGAGTTGGTTCCTTCCAGAGGGTTCGTGGTCTCGCTGGCTTCA

| | |
|---|---|
| Sequence 970 | cMhvSB086c06 |

CTCCCCGCGGNGGCGGCCNTCCGGGCAGGTNTTAAAGCCATTTTGCCCANNGTGGGCCTGGGCAC
TGGGNGGTTTCNAANCNNCAAAGTGAAAGAAGCGGTGAAGGTGGCCATTGATGCAGAATATCGCC
ACATTGACTGTGCCTATTTCTATGAGAATCAACATGAGGTGGGAGAAAGC

| | |
|---|---|
| Sequence 971 | cMhvSB088e07 |

AGCTCCACCGCGGTGGTCGAGCGGCCGCCCGGGCAGGTACGCGGGGCTCTCTCGCCAGGCGTCCT
CGTGGAAGTGACATCGTCTTTAAACCCTGCGTGGCAATCCCTGACGCACCGCCGTGATGCCCAGGG
AAGACAGGGCGACCTGGAAGTCCAACTACTTCCTTAAGATCATCCAACTATTGGATGATTATCCGA
AATGTTTCATTGTGGGAGCAGACAATGTGGGCTCCAAGCAGATGCAGCAGATCCGCATGTCCCTTC
NCGGGAAGGCTGTGGTGTTGATGGGCAAAGAACACCATGATGCGCAAGGCCATCCCGAGGGCACC
TGGAAAACAACCCANCTCTGGAGAAACTGCTGCCTCATATCCGGGGGAATGTGGGCTTTGTGTTCA
CCAAGGAGGACCTCACTGAGATCAGGGACATGTTGCTNGCCAATAAGGTGCCACTGCTGCCCGTG
CTGGTGCCATTGNCCCATGTNAAGTNACTGTNNCAGCNCAANAAACACTTNTNTTTNGGCCCTAGA
AAGAACTTCTTTTTTTCNAGGCTTTTANGTTATTNACCACTTAAAATTNTTTNAAGGNGGCACCATT
TTGAAANTCCTTNAGTNGATTNTNNCACCTTNATNAAANAACTTGNNANAACAAAANTNNGGGAN
CCCAANTNAAACCCACCCCTTNTTTNNAAACATTNCTTTAAAAANTTTNCCCCCTTTTTTC

| | |
|---|---|
| Sequence 972 | cMhvSB092f06 |

ACACAGCCTTCAACCCATTTCCTGGCATACAACTCCTAACATCCCGAGAATATCCAAAGTGATGCC
CTTTTCTAATGTTGACTGATGGATGGAAGCCCATAGTTAGCTTCAGAATTAGGGCTGCTCACCAGA
AAGACCAAGGCATGATTACAGAATTAGAACTTTCAGTCCCATCCCCTGACTTCCGGGGAGGGGAG
AGGAGCT

| | |
|---|---|
| Sequence 973 | cMhvSB093e05 |

ACTTTTTTTTTTTTTTTTTNTTTNNGNANTATTTNTTTTTTTNTTATNTTTTTTTTCAAAGGTTTTTATT
NTATCTANNTTTNCTTNGATTGTTANACANTNGGCATNCNNANAACAACTACAANNACCACTCCTC
CGTGCTGGACTCCAACNGCTCCTTCTNGCTCTACAGCAAGCTCACCGNGGACAAGAGCAGGTGGC
ANCANGGGAACNTCTTCTCATGCTCCATGATGCATGANGGNCTGCACAACCACTACACGCANAAN
AACCTATCCCTGTCTCCGGGTAAATGAGTGCGA

| | |
|---|---|
| Sequence 974 | cMhvSB095h05 |

CNNATTGGAGCTCCCCGCGGTGGCGGCCGAGGTACGCGGGATCATTGATCAAGTTCAGAGGCTCT
GATTTGAAACGTGCATGCTTGAATACGCCATGGAGGAGCTGGTGGACGAGGGGCTGGTGAAAGCC
CTTGGGGTCTCAAATTTCAACCACTTCCAGATCGAGAGGCTCTTGAACAAACCTGGACTGAAATAT
AAACCAGTGACTAACCAGGTTGAGTGTCACCCATACCTCACGCAGGAGAAACTGATCCAGT

| | |
|---|---|
| Sequence 975 | cMhvSB096b06 |

CTGATTGGAGCTCCCCGCGGTGGCGTTGATTCTCATAGAAATAGGCACAGTCAATGTGGCGATATT
CTGCATCAATGGCCACCTTCACCGCTTCTTTCACTTTGCCGAGAAGAGACCTCCAAGTGCCCAGGC
CCACAATGGGCATCTTGGCTTTTGTACTGAGCTCCACAAACGTGGCCATGGTTGGTGCGGAAATGA
TTCTGAGTGAGCGGGTAGAAGTCTCACGTCCTGCTGTGTCCAGAGTTGTTCCTTCCAGAGGGTTCG
TGGTCTCGCTGGCTTCAAGAATGAAGCCGTGGACCTTCACAGTGTGTGTTACAGCTGTTAAAGATG
TTGTGTCTGGAGTTTGTTCCTTCAGATGTGTCTGGAGTTTCTCCCTTCTGGTGGGTTTGTGGTGTCGC
TGACTTCAAGAATGAAGCCCGCAGACTGTCGTGGTGATCGTTGTAGCTCTTAAAGGTGGTGTGGAC
CCA

| | |
|---|---|
| Sequence 976 | cMhvSB096d07 |

TAGGGCNAATTGGAGCTCCCCGCGGTGGCGGCCGANGNACNAGGTACACTNATATGGTTTTACTC
CGGCAGTCTTCNANNANACACTGATATTGNGACTGAAGGGNTCTGCACATTTTCTACCTTCTTTAC
CTTCCAGAGTNTCTCTNNCNTATGGCTTCTTACATTTCGTCCTTGGNTTTTGAGTTGANNTTCAACA
TNNGGGGNNTCCCATTTTTCCCCTATAGATGCCANGANCTTGAATGTTTNCTGCATCACATNTCTCC
NCANNNTCTTCTGTAAANGATCCAACNCAGCCCANTNNTNCTGGNNNAAANNNACAGACACATTC
TAAAAAGCCACTGNCNCCATTTTCCGGNNTNTCGGGTGTCCCGGTGTTGNCCCTAAGGT

| | |
|---|---|
| Sequence 977 | cMhvSB098f05 |

AGGTACCGCTTTGGTGACCTCAGCGTGACCTACGAGCCCATGGCCTACATGGATGCTGCCTACTTT
GGTGAGATCAGCATCGGGACTCCACCCCAGAACTTCCTGGTCCTTTTTGACACCGGCTCCTCCAAC
TTGTGGGTGCCCTCTGTCTACTGCCAGAGCCAGGCCTGCACCAGTCACTCCCGCTTCAACCCCAGC
GAGTCGTCCACCTACTCCACCAATGGGTAGACCTTCTCCCTGCAGTATGGCAGTGGCAGCCTCACC
GGCTTCTTTGGCTATGACACCCTGACTGTCCAGAGCATCCAGGTCCCCAACCAGGAGTTCGGCTTG
AGTGAGAATGAGCCTGGTACCTGCCCG

| | |
|---|---|
| Sequence 978 | cMhvSB098f05 |

GCGTAATCATGGTCATAAGCTGTTTCCTGGTGTGGAAATTGTTATTCCGCTTCACAATTTTCACACA
ACATACGAAGCCCGGGAGCATTAAAAGTGTAAAGCCTGGGGGGTGCCTTAATGAGTGGAGCCAAC
CTCACATTAAATTGCGGTTGCGCTTCAATTGGCCCGGTTTTTCAAGTCGGGGAAAAANCTGNTCGN
GGCCCAACCTGCATTTAATTGNAATTCGGCCCAACNCCCCCGGGGGAAGAAGGCGGNTTTCGGGT
NTTTGGGGGGGGNTTTTTTTGGGTTTTTT

| | |
|---|---|
| Sequence 979 | cMhvSB099b12 |

CCGGGCAGGTACAAATCTGTTGCCAGCCTGAACACACCTGTAGGAGGTGGATGGAGACCCTGGTT
GAGAGGTCTCACCCAGCCAGTAGAAACAGGATCAGGGACCTGCTTGAAGAAGCAGTCTAGCCCCA
CTTTTGTAGAACAGCTGAGCTGTGCTGGGATACCATTTCTGCCCCTCATGGTGTTGGGTTCTCCAAA
ACCTGGAAGCTGGAACGGCTAAATTGCAGAAACAGCAAAGATGGCAAGCCTGCCCCTCTCTNTAG
TAACTCTGTCCCAGGATGCTTTCAAACCCTTGTCAACCAGAGAACATCANTGGGAGAGGGCTTGAA
AACCCCTTG

| | |
|---|---|
| Sequence 980 | cMhvSB104c04 |

CACTACTTAGGGCGAATTGGAGCTCCCCGCGGTGGCGGCCGAGGTACAAAAGCCAAGATGCCCAT
TGTGGGCCTGGGCACTTGGAGGTCTCTTCTCGGCAAAGTGAAAG

| | |
|---|---|
| Sequence 981 | cMhvSB105c08 |

GATTGGAGCTCCCCGCGGTGGCGTTGATTCTCATAGAAATAGGCACAGTCAATGTGGCGATATTCT
GCATCAATGGCCACCTTCACCGCTTCTTTCACTTTGCCGAGAAGAGACCTCCAAGTGCCCAGGCCC
ACAATGGGCATCTTGGCTTTTGTACTGAGCTCCACAAACGTGGCCATGGTTGGTGCGGAAATGATT
CTGAGTGAGCGGGTAGAAGTCTCACGTCCTGCTGTGTCCAGAGTTGGTTCCTTCCAGAGGGTTCGT
GGTCTCGCTGGCTTCAAGAATGAAGCCGTGGACCTTCACAGTGTGTGTTACAGCTGTTAAAGATGT
TGTGTCTGGAGTTTGTTCCTTCAGATGTGTCTGGAGTTTCTCCCTTCTGGTGGGTTTGTGGTGTCGCT
GACTTCAAGAATGAAGCCGCAGACTGTCGTGGTGATCGTTGTAGCTCTTAAAGGTGGTGTGGACCC
AAAG

| | |
|---|---|
| Sequence 982 | cMhvSB002g02 |

CCCTTAGCGTGGTCNCGGCCGACGTACACNNGGAGAGTGANGTGGNANAAGAAGAGTGTCTGGN
AAGNGTGCTCACTGNNTTCTTNGCTNATAATGTTNAATTGNAAGAGAGNNCGCTNAGAGCTNCTN
CAAAGGNANAACANAGCTTNTTAANTNACATTGNTANACANATTGNTGGCANNCTCTGGAATGCT
TGCATGGCTTTAATGTGGTGCCTTGCNGTGTCCTGTTTTCTNNCACATTGCCNNTNAAATNATCAAA
NGGGCNCTGATNNTTTGNNATNNNAAACACTGAAATTNATTTTNTTNTCGNGAGCTCTCACGANCC
AATCTTTNCACTCACATTCTTGGCCGCCTT

| | |
|---|---|
| Sequence 983 | cMhvSB005a07 |

CCCTTAGCGGCCCGCCCGGGCAGGTACTTTTTTTTTTTTTTTTTTTTTTTTTACCATCTCAGCAAATA
CATGGTTCTTAAAAACATACATGTCCATTTCTATGTCTCCCACAAAACATCTGAGTAATTACCTCCA
GACAATGTGTGCTAAACTTCGAGTTTTGAATATTGCTTTAAATTATTGCTACCACTTGTATATGACT
TTATTGTTTACCAAGCACTTGTATATATTACCTAGTATGTACAACAACACGGTAAAGTATGTATTTA
TCAAGAAAAAATAACCAAGATTCAGAAAAACTACGAGAATTAAATAAGGTCACTCACCTTGTAAA
CGATATAGCCAGGTTTTACAACGAGGTGCGCTCAATCACAAAGTATNTGCTTTTCCCCAATATCTT
CTTTAACTATAAACATTTATTTAATGCCCACTAATTGCCAAGAATTGNGCTAGAAACTTTCAAATTT
TG

| | |
|---|---|
| Sequence 984 | cMhvSB006h07 |

CCCTTAGCGGCCGCCCGGGCAGGNACTTTTTTTTTTTTTTTTTTTTTTTTTACCATCTCAGCAAATAC
ATGGTTCTTAAAAACATACATGTCCATTTNTATGTCTCCCACAAAACATCTGAGTAATTACCTCCA
GACAATGTGTGCTAAACTTCGAGTTTTGAATATTGCTTTAAATTATTGCTACCACTTGTATATGACT
TTATTGTTTACCAAGCACTTGTATATATTACCTAGTATGTACAACAACACGGTAAAGTATGTATTTA
TCANAAAAAATAACCAAGATTCAGAAAAACTACGAGAATTAAATAAGGTCACTCACCTTGTAAAC
GATATAGCCAGGTTTTACAACGAGGTGCGCTCAATCACAAAGTATATGCTTTTCCCCAATATCTTC
TTTAACTATAAACATTTATTTAATGCCCACTAATTGCCAAGAATTGTGCTAGAAACTTTNAAATTTT
GTCTTACTCTGGTAATTNTCATGAGGGATTACCGTATGTATCATGCTTGATAGTTTATTTTCA

| | |
|---|---|
| Sequence 985 | cMhvSB007b05 |

CCCTTGGCNGCNNGNGCCCGGNCTGGTACTGATTGGNGAAGTGATAANTGTACATGAAATCNNTA
CAATGCATGTGCAAAGATGGCANNGACACATGCNTCTCANATNATAAAAATANTACTGTGNGGAA
TNAAGAAATGNTCNTNAANNNNTAACANGGAATGNTCNNGTGCCATGGCNTNNNCCANTNNNTCT
GGTGGGGGGCC

| | |
|---|---|
| Sequence 986 | cMhvSB011e02 |

AAATGAGACTGCCTCAAAAAAAAAANAATGAAACTNTATTTTAGGCTGTTCTGGAGGATTCATTA
GTGCTCCCATTCGAATGTATTTANGANACCCGNACANGGTTGCAAAAGATGGGCTTTGTANGCCAT
TTGCATNTTGGTNAAATGGGACCCTTTCCAACAGGATCAAAACCTTTTATATTGGCCACAGAANAT
TNTTGTCTCATTTNACAAACGNGGGGACTACAACTAACTATATAGTGTAATTCTTTAAAGATTTGA
AAAAAATTGTCAAAGTAATANATATTNCATTCTTTTT

| | |
|---|---|
| Sequence 987 | cMhvSB011f05 |

CCCTTAGCGTGGTCGCGGCCGAGGTACCAGAGGGCAAGAAGCAGGGGAAGAGCCCCTGGAAGCA
CACAGAGGTGTTCTGCTCCATCCCATCCCGCTCCCTGCTCTCCCCAAGCTACTACCACAGCTTTGGA
GTCACCGAGAACTATGTCATCTTCCTTGAGCAGCCTTTCAGGTTGGATATTCTCAAGATGGCAACC
GCATACATCCGGAGAATGAGCTGGGCCTCCTGCCTGGCTTTCCACAGGGAGGAGAAGACTTATAT
CCACATNATCGACCAAAGGACCAGGCAGCCTGTGCAGACCAAGTTTTACACAGACGCCATGGTGG
TCTTCCATCACGTCAACGCCTACGAAGAGGACGGCTGCATCGTGTTTGACGTCATTGCCTACGAGG
ACAACAAGCCTCTACCAGCTCTTCTACCTGGCCAACCTGAACCAGGACTTNAAGGAGAAACTCCA
GGCTCACCTCGGTCCCCACCCTTAAGGAGGTTTGCCGTGCCCCTCCACGTGGACAAGAAATGCAGA
AGTGGGCACAAAATTTAA

| | |
|---|---|
| Sequence 988 | cMhvSB014a09 |

CCCTTNCGAGCGGCCGCCCGGNCAGGTACTGCCACTCCAAGGGCATCACCGNTACNGCCTACAGC
CCCCTGGGCTCTCCGGATAGACCTTGNGCCTAACCTGAGGACCCTTCCCTACTGGAGGATCCCAAG
ATTAAGGAGATTGCTGCAAAGCACAAAAAAACCACAGCCCAGGTTCTGATCCGTTTCNATATCCA
GAGGAATGTGACAGGGATCCCCAANNTCTATGACACCANCACACATTGTTGGAGAACATTCAGGT
CTTTGGACTTTAAATTGAAGTGGATGAGGAGAATGGCAANCANTACTTCAGCCTTCAACCANAAA
CCTGGGAGGGGCCCTTTTTGAACTTTCAAAGGGAAATNNTTCTNCATTTTNGGAAGGGACCTTTTN
CCCCTTTTGAATGGCAAGAAAATNATTTGGAGGGTTTGAAATTNTTCNCTGGGNTGAGGAATTTAC
CAC

| | |
|---|---|
| Sequence 989 | cMhvSB014g02 |

CCCTTTCGACGGCCGCCCGGGCAGGTACAGTTGAAGCTGCANAGTTTTACCAGTGGNCAATTTCTT
GTGTTTCATTTAAAGAACAGTTTCACAAAGGGGCTTTATTGTGCCATTGTGGGGGCCACGTGCCAA
TCAATAGCATGGGACAAAGTAAGTAAAGGCATGAAGAAACAAACAAGCAAATTCACGAAAACAG
AAGTGCTTAAATTAACCAAGTGACAGTTTGTGCATCAGTCTCACAATGGGCTGTCACATGAAATGA
GGGGCAGAAGAGGGTGAAGTACCTCGNCCCGCGACCCACCTAAGGGGCCGAATTTCCAGGCACAC
TTGGNCGGCCCGTTACTAGTGGATCCCGAGCTCGGGGCCAAGCTTGGG

| | |
|---|---|
| Sequence 990 | cMhvSB015d09 |

ANGNGNGNTCGAGCGGNCNTNAGATGTGATGCGATATCTGCANCAATTCGCCCTTAGCGTGGTCG
CGGCCGAGGT

| | |
|---|---|
| Sequence 991 | cMhvSB015d09 |

CTCACACTGGACACCTTTTAAAATAACAACAAGGAAAACCCAGCTNAGTCCAAACTCCATGGTGA
GTTNTCTGTGTGCAGNCCTGATCAGCACGCANAAACAGCTGGGAATCCCAGGGCTGGGGCTCCTC
CCCGCGTACCTGCCCGGGCGGCCGCTCGAAAGGGCGAATTCCAGCACACTGGCGG

| | |
|---|---|
| Sequence 992 | cMhvSB027g09 |

CCCTTTCGAGCGGCCGCCCGGGCAGGTACTTTATTTTTTTTTTTTTTTTTTCGNGAAAANNGGGGGN
AANCTTTTTTNTAAAAANNTTTNNNAAAAANNNTTTTTAAANNGGGGAAATTTTTNCANANNGGG
NAAAAAAAGGGTTTTTTNNNGGNAATTTTTTCCCCCNTTCCCAANAAAANAANCCCTTTTTTAAAN
NNNNCCCNTTTNAAAACNNNNTTNNNNCCCCAAANNANNGNAAAANTTNNNAAAAANNCNTTTTT
TTTNNNNNCCCCNANAGANAAAAAAAANNGNTTTTNTATNGNGGNNNAAATACCCCANGATTTTT
TTNNCNCNGGTNTTTTAAACNCTTNAAAAAAAAANNNCCCCCCAATAAAATTGGTNTTGGGTNGG
GANAAAAAA

| | |
|---|---|
| Sequence 993 | cMhvSB028c06 |

CCCTTTCGAGCGGCCGCCCGGGCAGGTACTTTNTTTTTTTTTTTTTTTTTTTAAAAAAANANCNTTT
NCNTTTTTNCCCCGGGCNGNNTNAAANNNCNGGGCNTAAANNANTTNNCCCCCNTAANCCNCCAA
AAGGGGGGGANTNNNNGGNGNNNNCCNCNTTCCNNGGNCAAAAANCNGNTTTTAANGNCCCNCC
CAAAANGGNTTTCCAGGGGGAAATTTNNNTACCCNGNTAATTTTAAAANNNAAATTTCNGNGNAA
AANNGACCCNAANTTTGTGNGGTTTTCCNNNCCCNTTTTTNAAANNNNTNNTNNTGTATAAANNN
CNNAAAAAAATAATNNNTTTNANAAAAAAAAA

| | |
|---|---|
| Sequence 994 | cMhvSB029a03 |

ACTNTATTNTTTTTTTTTNAATNAAGTNTGGANNAAAAAANNNNNGGNTNGTGACAANNGGANNT
TNNACCCCCCNNANNNNNNCNAGGCTNNGGNCCTGGAAGCNNNTGANNTTTNACACNGAAANNN
CCCCCANNAAACNGGGGACCACCCCCTNCNCCATGGNGTGTNTTNCCCAAAACANCTTTAANTNG
GNAGGGAAAATAAGAAAAGGGGAGGTTTGGGGAAAAAGTCATCCCCAGTCTTGAATCCCTGTGGC
CAGTGAATAAGATATACGTCCAGATAGCTCAACTTCAGGTCCTTGAGG

| | |
|---|---|
| Sequence 995 | cMhvSB030e04 |

CCCTTANCNNNGGCCNNNCCGACGTGCACNGGAGCNGGGANCCGNTCANATACNNTNNCACACC
NCNNNAACTTTGNGCTTACCCTNTNGACAAANAANCNNGCTGCTGNTGNCTCTTNGGGNNCACAC
NNCCTTTAANAGCTACANNGATNANCANGACANGGNGNGGCTTCATTCTTGAANTCNGNGACNCC
ACAAACCCANCCCAAGGGNNAAACTCCGCACCCNTNTNANAGAACAAACTCCAAANNCNNCATN
TTNTACAGNTGTAACACACACTGTGAAAGTNCACGGNTTCATTCTTGAANCCAGCNNGACCACAA
ACCCTTTGGAANGAACCAGNTCTNGACACAGCAANGACGTNANANTTCNACCTGCTCACTCNGAA
TGATTTTCGTACCAACCATGGCCACCTTTGTGGAGCTCAGTACCTGCCCGGGCGGNCGCTTTAAAG
GG

| | |
|---|---|
| Sequence 996 | cMhvSB030f11 |

CGTNCCCTGANNTNNANAAACNTNGCCATNGTTNGTGCNNAAATNATTTTTATTTATCATNTAGAA
NCCACACAAAAATTTTTTTTNNGNGTTTTTTTNTTCCAGAANNAAAGGNTCTCACNTNCTTGGNGA
ANNAAAANANCCACCNTCACAGTGTNTGTTACANTTTGNTAACNNATGGGGGGGGGGG

| | |
|---|---|
| Sequence 997 | cMhvSB031c01 |

CCCTTTCGAGCGGCCGCCCGGGCAGGTACCCGNNCTTGGNGNTNAGGGTNGAGAACNTATGAACA
TTGTGTGGGGNNGNNTGNNNTATGGACNNNGNTACNTTCNTGCNNNCAANGCNNCANTANNNTGT
CTCATANCCACACTNCTACTTGGGANCCNTTACNGANNCCTGNAAAGCGGATTGNTTTCCNGNCCN
GGCGGGANTGNAAACNACCACTGNCTCCAAACAAAGCATCAACAGCTACCTGGGGATGNGGANA
ACTCTGGTTGGCGAATTTCACGAACTGGNGGAGGNTCANTGGNCNNTCACGAACAACANACNTGN
TACTGGTNGGCNTTGTTNTTGGTCCATTCTNCTGGGACCACCACCCTGGAAGGACACTTGAGCCCT
ACTCAAGGACCCACC

| | |
|---|---|
| Sequence 998 | cMhvSB031e05 |

CCCTTTCGAGCGGCCGCCCGGGCAGGTACTTTTTTTTTTTTTTTTTTTTTNGGGGNNNNNNTTNNCC
NNNNNGGGGNAAANTNNNNNAANNANAACCNNAACCCNAAGGGGAAANNANGNAAANNTNNNC
CCCTTTTTTTTTTTTTTTGGGGGGGNTTCCCCCCCNNNNTTTTTNGGGGAAAAAANCCCNCCCAAAA
AAAAATTTNAAAAATTNCCTTTNNNCCNAAATTTTTTTNTNCCCTTTTTNCCCCNANANTTTNAANG
GGGGGGTTTNNNNNANGGGGNNNNAAANTTTTTNAAAAAAAAAAAN

| | |
|---|---|
| Sequence 999 | cMhvSB032c07 |

CCCTTAGCGTGGTCGCGGCCGAGGTACTGAGCTCCACAAACGTGGCCATGGTTGGTGCGGAAATG
ATTCTGAGTGAGCAGGTAGAAGTCTCACGTCCTGCTGTGTCCAGAGTTGGTTCCTTCCAGAGG

| | |
|---|---|
| Sequence 1000 | cMhvSB033a04 |

CCCTTAGCGTGGTCGCGGCCGAGGTACAGGTATGCCCTGGCTGCCTCCACACTTCCACCCACTCCC
AGGGAGACCAAAAGCCTTCTTACATCTCAAGGTAGGGACAAAAATGGGGACCATGATGGCTGATT
ATTCAAAATAAAACAAAAAGTATTAAGGTGAAGATTTTTTAAAATGCTGCATTACATAATTTACAT
GAAAGCAATCCTGTAACCTCCCCTTTGTGGACTCAGGAGAGAACTGGGCCGTTCTCCTGAGAGAA
GTGGGGTGGCTTTTGGGAGGGCAAGGGACTTCCTGTAACAATGCATCTCACAATATGTGGAATGA
CTATTTTAAAGNNTAACCTTGNANAGTACCTGCCCGGGCGGCCNCTNGAAAGGGCNANTTCCAGC
ANACTGGCGGCCGTTACTTAGTGGGATCCGNGCTNGGNACCAACCTTGGCGTAAATAANNGGNAA
TAGCTNNTTTCCTGGGGGGAAATTTNTTNTCCCCCNCAAANNTTTCCCCCNCAAAANANCCNAANC
CGGAANTTTTTAAAAGGNNAAAANNCCNNGGGGNCCCCTNAANGGNGNGNCNCTAACCNCCAAA
TTAAATTNGGNTNGGCCCNCNCNNGCCCNTTTTTNANGGGGGAAAAACCNCGGNGGGCCCCCTTT
TAATANAAAAAAANNCTCCNCNCCCNNGGGGGNNNNNGGNGGNAAGTTTTTTGTGGGNTTTNCCC
CCNANNTTTTTTTNTTNTNTNNNNNNNNNNNNNGNNNNNTNNGGGNNGGGGGNANAGGGNTTTTN
NTTTNTTNTANNGGGGNTTTTNNANAAAAAAAAAAA

| | |
|---|---|
| Sequence 1001 | cMhvSB045c01 |

AGGTACGCGGGGGGGATCTCAGGAGGCAGCTNTCTCGGAATATCTNCACCATGGCCTGGGCTCTG
CTCCTNCTNACCCTCCTCACTCANGGCACAGGATCCTGGGCTCAGTCTGCCCTGACTTANGCTTCCT
CCNTGTGCCTGGATCTGANTGNGACAGTTCAGCGCACTNATATTTCGGNGCTCATTGGGGACGCAG
TCAGNTGNACACTCAGGNTCAGTNTAGTACACCAGACGTGNTCTANGAGTTACCTNGCCCATGNC
CNGGTTCTGTTTACTNANCAACTANATNACATCCTCCGCGTNGCCTGCCNGGGAAATATCCGATAN
TGGAAAACNAGNTTTCATACGCGGTACNCTGTCCCNGGGTGGGNGCCCCNGTACCCAAGCTTTTTT
GTTCCCCTTTTAAGGT

| | |
|---|---|
| Sequence 1002 | cMhvSB046f03 |

CCGGGCAGGTACCNGTNTTNATNTCTNNNTNGATNACNTCCGGGGATACAATACTATCCATACTCC
NNGCCGANNTNGNTATTTGAACATGNTANGGNTGCCTCACCTGCCTAGCGGGTTGGATTTCCCATA
CCGGGCTTGGCTCCCTNATGGGCCTNCCTGTTCCCNATCAGAGGGATCTACCNTNTGCCCAGAGGC
AGTNACAGGCCAAGGGAAGCANGCAGGGCTTGATATGAAGCCTCCCTCTCAACCACTGTGGTCTC
AGCNACTGNNCCCGCTGAGGNATCTTCANTTATGGGGGNANTTTNTGGGAAAACGAGNAGGGANC
CNCCTTATTTTATTATTCACATGTCNATTTTNTNTGATTCACTNNTAAGCAAAAAGTTCGAGNNTAT
ACCAAGTGTTCNTTAAAAAAAAGTAAAAGNNGCTGTTTGGGATGCTCGAGNGGGTGCTTGGCANG
AAANACAACTGGGGAATCCNAATACTTTAATAATGGACAAAGCNGTGGCGTNGCCCTTCNAAAGG
NGNGGGGGGC

| | |
|---|---|
| Sequence 1003 | cMhvSB048g08 |

NTTTTTTTTTTTTTTTTTTTTTTTTTTTTAGNANAGACGGGGTTTCACCGTGTTGCCCAGGCTGGTCT
CGAACTCCTGAGCTCAGGCAATCTGCCCGCCTCAGCCTCCCAAAGNGCTAGGACTACAGGCTTGA
GCCACAGCACCCGGCTGACACTTTTNTTNTTGGAGCCTCAAGCAACCAGGCTCCTCCTGCCAGCCT
TTACCCTCCTGGGATGTTCTANAGGACANAGCCAGGTGACAGCCTTNTGTGGGGGAGCAAGGATC
AAGGCCTTGCTTGAAAGGGTGAAAGGGTGTGTCTCCCCTTACTTCTGGGCCTTCACACACACCTCC
TTTGCCTCGCGTNTTCACCCTGCCGACTTAAGGGGCANAGCCAGACTTTAACTANAAAGCCATATT
CTCAATAACTATGCAAGGAGGAATGCCCTCCTTGAGGGCTTGAGCCANANCCTTTCATTGGGGTAG
TCACGACAGCAAANCTATTACCTTTCCCTTTTTATTTGGCC

| | |
|---|---|
| Sequence 1004 | cMhvSB049c01 |

TGAGGGCGAATTGGAGCTCCCCGCGGTGGCGGCCGAGGTACTTTTTTTTTTTTTTTTTTTTTTTNNN
NNNNNNCCCCCCCGGGGGGGGNGGGGGNNNTTTNCCCCCCNNNCNCCNNNNTNGGNNNGGGGAC
CCCTTTTTAAGGCCCCNTTNNNGNAAANAACCCCTTTTTCCCCCNCCCCCGGGGNCCNCANNGGGG
GNCNGGGAANNCCCNTTAAAANNTTNNNGGGNNAANNTTNAANNGGGNTTTNCCCCCCCCCCGGT
NNTTTTAAAANCNAAAANNTTTTNGGGGNAAAATTTTTAAAAANAAAAANGGGNANTTNNNTTTT
TTTAAAAANNNCNNTNNTTTTTTTNAAAAAAAAAAAANTTTNNGGGGNTTCCCNGGNNTTNNNNC
AAAAACCNTAGGNAAAAAAANGNCCNTTNGCCNCCNAAGGGNNGCNANAAAAANGGGNNGGNN
NGGGTAAAAAAAAAA

| | |
|---|---|
| Sequence 1005 | cMhvSB051g12 |

GGGCGAATTGGAGCTCCCCGCGGTGGCGGCCGAGTACTTTTTTTTTTTTTTTTTTTTTTTTTTTTTTTT
TTTTTTTTTTTTTTTTTTTTTTTTTTTTTTTTTTTTTTTTTTTTGGGCCNTTTNTTTTACTTTNTTTAANN
TTCCCCCCNCNANAACNNCNCCTTTTTTTTAAACNAAAANCCNTCCNGGGTTCCNGAANGGGGGG
CNAAAAAAAAAGGAAAAGTCAAAANCNNCCGGANNGGGGGGGGGGGGAANAAANAAANCNNNT
TGNCNGGGCNNTTAAAATTGNNGGNNGCTTGGANCNCCNCCTNGTTGNCCCNNNGANTTAACCNA
ANAAANCNCNCCCCCNANTNAAAANGGNCTTNCCCCCCCCCCCCC

| | |
|---|---|
| Sequence 1006 | cMhvSB052e12 |

AGGTACTTTTTTTTTTTTTTTTTTTTTTGGGGGGTTTTTNNTTTTNTTNAAACCTTTNNAAANNNNAN
NGNNAAAAAAAANTCNTTTCCNGGNTTTNCNAAAANNANTTNGGGTTTNGGGCNTGAAATTTNAA
ANCCCCCNNNGGNNNAANNNNCCGGGNAAANNNTNCCNTTTTTTTNC

| | |
|---|---|
| Sequence 1007 | cMhvSB055e01 |

CCGGGCAGGTACAAATCAATCTAAAAGAGGTCAACATCCCAAAAGCAAATGGGCAACAAATATG
AACAATTCACAGAAAATGCCAAGCTCCTGATGCTGACCCTCCCTCATAAGAAAACTGCTAATAAA
AACTCCTGGAGAGGATGCTCACACCACCCTGGGAGGGAACACAGTGGTCTCTGGAGGAAGGCACA
GCATATGCTTTCGAGTTACCAAGGCACACAGCATTGTAGGCCAGGCATCTGGCCTACAGGATACTC
ACCCAGTCTTTACGGAGCAACTGTAAAAAACAACAACTGTTTACAATTAGCATAGTATCACCTGGA
ATCTACTTACATATCGATCCTCTCATTTCAAGAGAAGAACTTCTCCAATGCACGTCCTACCATACTG
TGGAAACTGGGAACTCATTCTGCATCTAGTTGGGATAGGAGATTAATTTCTAAACCCACAGCCCTT
ATTCTGCCCACACCCTGCCCCTGATCTACCCAAAGCATTTGCAAAGTGATGANGAGGCAGCCTNCT
GGGATAGAAACTTTTGAAGAAAAAGGCCAGTTNCAGATGGGCTGGGAA

| | |
|---|---|
| Sequence 1008 | cMhvSB055e12 |

GGAGCTCCCCGCGGTGGCGGCCGCCCGGGCAGGTACTTTTTTTTTTTTTTTTTTTTTTTTTCCTTTTT
TTTTTTTTTTTTTTTTTTTTTTTTTTTTTTTTTTTTTTTTTNGCCNTCAATTTNTTAAAANAANCNTGTT
TAGCNGGTTTNANCAATNGNNTNGNNGTTNGGGGTAAAAANNCNTAAAAANGANANGGGGGGGT
TGGCANCANNCCGAAGTNGGTTTNTNNCCATNCCCTGCANTTNTGGGNNCCAANGGNNTTGCAAA
ANGTTAAAATAAATCNCAAAGNCGGGNGGCATNNNTNAATGGNANAAACCCCNCAANATNGNNT
NANAGNTTCATCCCGTNGGGGNAAAAAAAANATTCCNTCAATTNATTTANGGGNTTTNGGAGGGG
GCCTTGNCGTTCTANGANCCNNTTGAANAANNTNNTTTGTTTTNAAGCCCTTTAAACNCTTGGGGN
TTNGNNNCGGGCTTTGGAAAAANNCNCTTTTTNCCNAAAAGGGGGGGCGGNACCCNNANCCNNCN
GTNAANACTTTGTTTGGGGNGNNGGGGGCCCCCCCCCCC

| | |
|---|---|
| Sequence 1009 | cMhvSB058a08 |

AGGTACAAAAGCCAAGATGCCCATTGTGGGCCTGGGCACTTGGAGGTCTCTTCTCGGCAAAGTGA
AAGAAGCGGTGAAGGTGGCCATTGATGCAGAATATCGCCACATTGACTGTGCCTATTTCTATGAGA
ATCAACATGAGGTGGGAGAAGCCATCCAAGAGAAGATCCAAGAGAAGGCTGTGATGCGGGAGGA
CCTGTTCATCGTCAGCAAGGTGTGGCCCACTTTCTTTGAGAGACCCCTTGTGAGGAAAGCCTTTGA
GAAGACCCTCAAGGACCTGAAGCTGAGCTATCTGGACGTCTATCTTATTCACTGGCCACAGGGATT
CAAGACTGGGGATGACTTTTTCCCCAAAGATGATAAAGGTAATATGATCAGTGGAAAAGGAACGT
TCTTGGATGCCTGGGAGGCCATGGAGGAGCTGGTGGACGAGGGGCTGGTGAAAGCCCTTGGGGTC
TCAAATTTCAACCACTTTCAAGATCCGAGAGGCTTTTTGAACCAAACCTGGGCTGGAATTTAACCN
AGTGACTTAACCNAGGTTGNAGTGTCACCCATTACCTTACCCCAGGANAAAACTGATCCCAGTTCC
CTTGCCCCNGGCCGGNTNTTAAGAACTAAGTGGGATNCCCCCCGGGCTTGCAGGGAATTCNATATC
NAAGCCTTTATTCGATACCCCTTCGACCCTCCAANGGGGGGG

| | |
|---|---|
| Sequence 1010 | cMhvSB058c02 |

TTTTTAAGGATTCAAGAGGTGATCTGGCTTTTGTGAAAGTGTACGCGGGGACGGCTTCTGCTGGCG
GCCGCNGANACGCAAAGNCTTGAGCAGCGCGGNAGGCACCATGTTCCTGACTGNGCTCCTCTGGC

| | |
|---|---|
| Sequence 1011 | cMhvSB059a06 |

NATCCAGATACTTNTGCCTGCCTTGAAGTGANGGCCTNNCACCAAANGNNCCATGNGCACCNTGC
TGNCNATGAACNGGNACTCCCNCNTNANAGNCTNNTNTNGNATCTTATNTTGGANGGCTTATCNC
ACCTNATGTNGATGNNCATAGAATTAGGCACAGNGANTGGGGCGATATTNTGGATANANGGCCAN
CTTGNCCGGTTTTTTCANTTNGCCNAGAAGAGACTGAANTGCNCAANACNNGCCCNTNACACATG
TATTNTTNTTNTAAGAGANGANACNTTGCCNTGTTGCCCAGGCTGGACTAACACTGNCAGGTNNA
AACANTNCTNCGAACTCCTGAGGNANCTGGAATTACACCACACTGAGCNNCACCATATTGGTCTT
ATCCNCAGACCACNTTGNCCTGCCCCACACAGTCCAGTTTATCCAAACNAAGGCTTNCTGGGGGNC
TTCTNTTTGCCANGGAATATCTGGNAGGATACACAGTGTANAANAATTTNTCANACCAAAAGGAA
GGAAAAGCGAATTTAATTTTATGGATNNTGCCCCTTTNGCCCTATGCTANCTNAAAAGGTCAAATT
GCCCTTTTTCATTCAAGGGTTANTTCCTGAAAATGGTCCNTCCAGGGTGGNGGGGGGGGGG

| | |
|---|---|
| Sequence 1012 | cMhvSB060b01 |

CCGGGCAGGTACAAAAGCCAAGATGCCCATTGTGGGCCTGGGCACTTGGAGGTCTCTTCTCGGCA
AAGTGAAAGAAGCGGTGAAGGTGGCCATTGATGCAGAATATCGCCACATTGACTGTGCCTATTTCT
ATGAGAATCAACATGAGGTGGGAGAAGCCATCCAAGAGAAGATCCAAGAGAAGGCTGTGATGCG
GGGGGACCTGTTCATCGTCAGCAAGGTGTGGCCCACTTTCTTTGAGAGACCCCTTGTGAGGAAAGC
CTTTGAGAAGACCCTCAAGGACCTGAAGCTGAGCTATCTGGACGTCTATCTTATTCACTGGCCACA
GGGATTCAAGACTGGGGATGACTTTTTCCCCAAAGATGATAAAGGTAATATGATCAGTGGAAAAG
GAACGTTCNTTGGATGCCTGGGAGGCCATGGAGGAGCTGGTGGACCGAAGGGGCTTNGTGAAAGC
CCTTGGGGTCTCAAATTTTCAACCCACTTNCAGATCGGAGAGGCTTNTTTGAAACAAACCTTGGAC
CTGAAAAATATTAAACCCAGGTGGACCTTAAACCCNGGGTTTGGAGTTGTTCANCCCCATTACCCT
TTAACCGCCAGGGAANAAAAACTGGATTCCANTAACCCTNCGGCCCGCTTNTNAGAAAACTNNGT
GGGNANTCCCCCCCGGGCCTGNNAAGGAAATTTTCGATNTTNCAANCCTTTNTTNGGATACCCCGT
CCNAACCCTTCGAAGGGGGGGGGGC

| | |
|---|---|
| Sequence 1013 | cMhvSB062a03 |

CCAAGATGCCCATTGTGGGCCTGGGCACTTGGAGGTCTCTTCTCGGCAAAGTGAAAGAAGCGGTG
AAGGTGGCCATTGATGCAGAATATCGCCACATTGACTGTGCCTATTTCTATGAGAATCAACATGAG
GTGGGAGAAGCCATCCAAGAGAAGATCCAAGAGAAGGCTGTGATGCGGGAGGACCTGTTCATCGT
CAGCAAGGTGTGGCCCACTTTCTTTGAGAGGCCCCTTGTGAGGAAAGCCTTTGAGAAGACCCTCAA
GGACCTGAGGCTGAGCTATCTGGACGTCTATCTTATTCACTGGCCACAGGGATTCAAGACTGGGGA
TGACTTTTTCCCCAAAGATGATAAAGGTAATNTGATCAGTGGAAAAGGAACGTTNTTGGATGCCCG
GAAGGCNTTGGAAGNANNTNTNGGCCAAGGGCTTGTTAAAACCCTTTGGGGNTTTNAAATTTTNA
CCCCTTTTCCAAANNCNGAAAGGGNTTTTGNAAANAAACCCNGGACTGAAAATTNAACCCCGNGG
GCCTTAANCCCGTTTGNGNNGTGTCCCCTTNTCNCTTNACCCCGGGGGAAAAACNGTNNTCCCCAG
CTTTNNCCCNCCCCAANGGGGGTTNTTACCCNTTTNGGGGGTNNAAAANNCCCNNNNGGGGTTTTT
CNCGANANAAAAACTTTGGGGCCCAAAACCTTNGGGGACCCCTTTCNCTTTGGTGGGGNGGGANC
CCCCAAAANTTAAGGGGAAATTNNTTTGGCNAAANCCCCAAAAAAA

| | |
|---|---|
| Sequence 1014 | cMhvSB062d12 |

CGCTCATTGAGGATCTTCATGAGGNNGTACGGTNANGTTCCGGNCAGCCANGTCCAGACGCATGA
TGGCGTGGGGGAGGGCGTNCNCCTNGNNGATNNNCNCCNTNTGNNNTNNCCAATATTGAGAANA
NNTCTCCCNNCNTGGANANNANCCNNANGCTNATANGGACANTNCGGNCTGAATGGCCACNTACC
TTGGTCTTTNTAAAACNATGGGGATNCNNAAGTCTGTAATNAATNAAGATCTCACNNTAATATATN
NTCGCTGACCTCTTAC

| | |
|---|---|
| Sequence 1015 | cMhvSB065a01 |

TGGAGCTCCCCGCGGTGGCGGCCCGAGGTACAAAAGCCAAGATGCCCATTGTGGGCCTGGGCACT
TGGAGGTCTCTTCTCGGCAAAGTGAAAGAAGCGGTGAAGGTGGCCATTGATGCAGAATATCGCCA
CATTGACTGTGCCTATTTCTATGAGAATCAACATGAGGTGGGAGAAGCCATCCAAGAGAAGATCC
AAGAGAAGGCTGTGATGCGGGAGGACCTGTTCATCGTCAGCAAGGTGTGGCCCACTTTCTTTGAG
AGACCCCTTGTGAGGAAAGCCTTTGAGAAGACCCTCAAGGACCTGAAGCTGAGCTATCTGGACGT
CTATCTTATTCACTGCCACAGGGATTCAAGGTTTGAGTGACTCCCTTTCTCAGCCTCTANTTTCTGA
GCTGTTGCAGGAATTC

| | |
|---|---|
| Sequence 1016 | cMhvSB073e03 |

AGGTACTTTTTTTTTTTTTTTTGGTTTTTTTGGAAANANCNNCCCGGGNNGGGAAGGGGNAANTTN
NCCCCCNNGNNCCNTNNTTNGANNGGGGAACCNTTTTTNAAGNNNCCTTTTCGNAAANAAANCCT
TANTNCCCCTNNCCCNNGGGNNNCANNGGNGGGNNNGGAAANNNCANTAAAANNTTAATGGGNA
AAACTTTAAANNGGNTTTTCCCCC

| | |
|---|---|
| Sequence 1017 | cMhvSB077c04 |

GTGTTTCTGGTAAANCANACANNGCTCCGGGGANTANGCANNTANANACANAAAAACAAAAAGN
CNNANGNNNGANAAAAAANAAANNTTAAGGNTANANTAANACTAAAAAAAAAANATTGGGGAN
CTCCCCCTGTAACNTGAAANANAAAATGAATGCGGGNCGTNCCCCGTNAACTCNCACATTNCAAC
TAATNNTGGNNACGAAAAATCACATTGAACCCNGGANACGGACGTTTCATTGANCCGAAAT

| | |
|---|---|
| Sequence 1018 | cMhvSB077e06 |

TCAAGCTGGAGGTCATTACACCTACTCTGAGAATCGTGTGGAAAAAGACGGCCTGATTCTTACAAG
CCGGGGGCCTGGGACCAGCTTCGAGTTTGCGCTTGCAATTGTTGAAGCCCTGAATGGCAAGGAGG
TGGCGGCTCAAGTGAAGGCTCCACTTGTTCTTAAAGACTAGAGCAGCGAACTGCGACGATCACTTA
GAGAAACAGGCCGTTAGGAATCCATTCTCACTGTGTTCGCTCTAAACAAAACAGTGGTAGGTTAAT
GTGTTCAGAAGTCGCTGTCCTTACTACTTTTGCGGAAGTATGGAAGTCACAACTACACAGAGATTT
CTCAGCCTACAAATTGTGTCTATACATTTCTAAGCCTTGTTTGCAGAATAAACAGGGCATTTAGCA
AACTAAAAAAAAAAAAAAAAANTNNAAANNAAAAAAAAGGGAAANAAAAAANAANAAAAAAA
NGNTAGAAAAAAAAAAAAGGAATTTNNNNNNNGNGGGGGGGNCNCCTNTTTTTTTANAAAAAAA
ANCCCCCCCCCCCCCCCCCNGNGAGGNAAAAAAAAAAAAAAAAAANNANNNNGGGTTGTNNNNN
NNTATGNTNTGGGGGCNCNCCTNTTNGGGGGGGNAAAAAAAAAAAAAANNNCNCCCCNCNNNNN
NNNANAAAAAAAAAAAAAANTNTTTNNCCNCCNCTNTNTNNGGGGGGGGGGGCCNCCCNCCCCC
CANANNTGNNTNTTTNNNNANGNNTNTNNNCCCCCCGCCCCCCCCCNCANNAAAAAAAAANNTNT
CTTTNCCNCCTTCNAANANNAAAAAAANANNCNCCCCCNNGNGNNNNNGGGGGGGG

| | |
|---|---|
| Sequence 1019 | cMhvSB077g09 |

GTCGACCCACGCGTCCGTCCAGGTCGGTTTCTATCTACTTCAAATTCCTCCCTGTACGAAAGGACA
AGAGAAATAAGGCCTACTTCACAAAGCGCCTTCCCCCGTAAATGATATCATCTCAACTTAGTATTA
TACCCACACCCACCCAAGAACAGGGTTTAAAAAAAAAAAAAAAAAAAAGGGGNGGCCGTTAAAN
TATTTTAAAAAAAAANCNTCCCNCNCNTCCCCNNNANCNTNAANANNAAANNNANNNCNNTNGTT
NTNGTAANNTNNTTTTTNGCCCTTTNNATNGGGNNNNAAANAANNCNTTNCCTTCNNAATTTTCNN
AANNAAACCTTTTTTTNCNCNGNTTTNNATNGGGGGTTNGCCCAANCTCATAANNGTTTTTNNNNN
GGNNGGGACCCCNGGGNNCCNACCCCAAATNAATNCNTTTTCCNTTTCCTNGTTAANTNANTCGTT
GCCCTGGGCCNTTCGGTTGGGGNAANNGGTTTNANNTCCNTNAANGGGGGTATTNNGGGNTTCCC
NNNNTTTANAAAAAAAAANNAACTCTNNNNNNNNGNGNNNNNNANNAANNGGGNNNNNCCCNN
GGGGGGGNGNGTTTTTT

| | |
|---|---|
| Sequence 1020 | cMhvSB084b11 |

CTCCCTGCTATCATTNGGATTCNTTAAAAATTAAATCATCTCATAAGCTTACAAATGTTGATTTTTA
TTTATTTTTTTCATGATAAAACTTTCATATTTCCATGGNGNATGGAACTATAATTTTTTATGNGTTTC
TTTACGTGTAAGGNGAGAGTGGCAAGAACATAAAACCTTCACCTGTTAGTCTTAGATTTTCTTGGG
CTGGGGAGGGGCAGNAGGGCTGGAACCAATCACTGATGGGCNCCCAGNCCCTGGACTGAAATTTC
CNGGGAANGCTTAANCAAACTNTGTGGGGGGGGNCCCTTNAGAAATNGNCCCCCCNGCAAACAC
NAGGNCNCCCCGGGNGCCCCTNANAAACCCCCCCTAAAAGGCCCCCCCAAAAGGGGNTTTTCTTT
TTTAAAAAAACCCCCCACNGGGNGGNNGCTTNNNNAAANNNAAGGGNGNATAAAAAANNNNCCC
CCNGGGGGNAAAAAAAAAAAAANACCCCCCCCCCCCNGNGAGGGNGGGNGGGGGGGGNCTNNA
NCAAANCNCCCCCCCGGNNANANAANAANCCCACCCCCCCNCNCGCCNNGGGGGGGGGNNNANN
CCCCCCCCCCCCCNCNAAAAAAAAAAAAAAAANNCCNACCCCCCNCCNCCCNNAAAAAAAAAAA
AANANNGCCCCCCCCCCCCCCCNCGGNACANNNNANTAAAANNNNNTNCNCNCCCCCCCCCCCCC
CNCCGCG

| | |
|---|---|
| Sequence 1021 | cMhvSB086b02 |

TNCGGGCAGGTTCGCGGGGGATTAATGGGTTATCACAGGAATGGGACTGGTGGCTTTATAAGAAG
AGGAAAAGAGAACTGAGCTAGCATGCCCAGCCCACAGAGAGCCTCCACTAGAGTGATGCTAAGTG
GAAATGTGAGGTGCAGCTGCCACAGAGGGCCCCCACCAGGGAAATGTCTAGTGTCTAGTGGATCC
AGGCCACAGGAGAGAGTGCCTTGTGGAGCGCTGGGAGCAGGACCTGACCACCACCAGGACCCCA
GAACTGTGGAGTCAGTTGGCAGCATGCAGCGCCCCCTTGGGAAAGCTTTAGGCACCAGCCTGCAA
CCCATTCGAGCAGCCACGTAGGCTGCACCCANCAAAAGCCACAGGGCCCGGGGCTACCTGAGGCC
TTTGGGGGGGCCCAATTCCCTGCTTCCAAGTGGTTGTNCCGTGGAGGGCAAGCNACCACGNAAAG
TTNAAAAAGTAAGATTTNTTTNTTTTTTCCCACCANGANTACCTTTTTTTNTTCTTCCCCATTGACCC
NTTTTAACNAGCAAATTTNGGNTTTCNATTTNCCCCNTCNACCTTTTCCCAAGGCCTTGANTTTTTG
ANGGGAAAAACTTTTTTAAAGTAAAAAAA

| | |
|---|---|
| Sequence 1022 | cMhvSB090b09 |

AGGTACTTTTTTTTTTTTTTTTTTTTTNAAAAAAAAATTTNNTTTTTTNNNNNANNNNNGNTNNNNN
GGGCCNTTTTTNGNCNNANNTNAANNTTNNCCNNNNGGNTNANCCCCNNTTTNAANCCNAANCCC
CCCNAANNANNGNAAANAAAAAANCCTTNNNNNNGGNCNGGTTNNTTTTTNGGTTTTTNAAAAA

| | |
|---|---|
| Sequence 1023 | cMhvSB092g03 |

CGGTGGCGGCCGCCCNGGCANGAACTTNTTTTTTTTTTTNTTTGAANGGNATANNNNTNTTATNGA
TACNNNCGAACTNGNGGGNGGGCCCCGAACCCGGGTNNAGGGCCNTNNAATGAGTGTTTAATNN
NNGCGCTTGGCGGTANTCAAAAAATANNTGTTTTCTGAAAAAAAAAAAAANCCNNTCCNNNAAAA
CCCNNCCNGNNGGCNTTNNNNCCGGNAAANNAAANNTTTGGGGGGGGNNTTTTNNNGNNNANNT
GNGGGNNCNNAACTTTTAAAAAACCNTNTTTNNGGGGGGGNTTNTTTTTAAAAAAAGGAACCCCN
TTGNCCTTGGGGAAAAAAAAAA

| | |
|---|---|
| Sequence 1024 | cMhvSB098a01 |

ACAAAAGCCAAGATGCCCATTGTGGGCCTGGGCACTTGGAGGTCTCTTCTCGGCAAAGTGAAAGA
AGCGGTGAAGGTGGCCATTGATGCAGAATATCGCCACATTGACTGTGCCTATTTCTATGAGAATCA
ACATGAGGTGGGAGAAGCCATCCAAGAGAAGATCCAAGAGAAGGCTGTGATGCGGGAGGACCTG
TTCATCGTCAGCAAGGTGTGGCCCACTTTCTTTGAGAGACCCCTTGTGAGGAAAGCCTTTGAGAAG
ACCCTCAAGGACCTGAAGCTGAGCTATCTGGACGTCTATCTTATTCACTGGCCACAGGGATTCAAG
ACTGGGGATGACTTTTTCCCCAAAGATGATAAAGGTAATATGATCAGTGGAGAAGGAACGTTCTT
GGATGCCTGGGAGGCCATGGAGGAACTGGTGGACGAGGGGCTGGTGAAAGCCCTTGGGGTCTCAA
ATTTCAACCACTTTCCCAGATCGAAGAGGCTCTTTGAACAAACCTGGACTGAAATATTAAAACCAA
GTNGACTTAACCCAGGTTGAGNTNTNACCCANTACCTTAACGCCAGGAANAAAACTTGGNTCCCA
GTTANCCTGCCCCCGGGGCCGGCNNCGTTTTTANGAAACTTAGGTGGGAATCCCCCCCGGGCCTTC
TNNNAAATTTCCGANANTTNAAGGCTTTTNNGATNACCNGGNTAACCCTTTNANGGGGGGGNCNC
CNNNGTNCCCCNATCNTTTTTNTTNCCTTNTANCNGANGGGNTAANNTNCCCCCTTTGGNAAAAAA
NNTNNGGNCNTTNNCTTNTTTNCCTGGNGNTNAAAATTGTTTTNTCCNTTTAAAAATTTGNANNCC
CCCCCCCCCCCN

| | |
|---|---|
| Sequence 1025 | cMhvSB098d11 |

TTTCCCTGCTTTTAAATATATTATTCATTGACGGTAGAGGAAAAGAAAAGGCNNTGNGCCTNCTTG
CTNAGTCANNGCCCAGAGCACTGGGCAAACNANTTTTTCACCTTTTGCCTGGCGCCAANGAANGG
AAATGTTTGGCTTTTACATGACAATTTGNTTGGTNTNACGGTGAAAAAAACCTTTTCTTTAGGAAA
AGGAGGCCATTTCTTTTGAGGAAAANTANAANTTTAGAATTTGGGGTTATAANTTNTTTGNGGTTA
ATAAAAATTGGTTANGGGGGGGGTACAAAACAANTATTCTTGGTNCTTTCCCAATTTTNCCTCCAA
CCTTATTATNAATTCNCCACCCCCCTTTTTTTCCCCCTTGTTTCCCTTTTTAAAAAATTTTTAANGAA
TAAATTTTTGGGGAATTTTTTNAAAAAANGTNNTTTCCTTTTTTCCTTTTTTT

| | |
|---|---|
| Sequence 1026 | cMhvSB101a12 |

AGGTACTTTTTTTTTTTTTTTTTTTTTTTAANGGGNNNGGNTTTTNNGGGCCNNNNNNNNNNNNGGG
GNNGGGCCCCCCNAANGGGNNCCGGGNNNNNNAANNGTTTTTTNNNNNNNNNNNTGGGNCCCNA
AAAANNANTTNNNNTTTTNAAAAAAAAAAAAANCCCNNNCCNAAAAANCCNNCCGGNNNGCNTT
TTNCCCGGNAAANNAAAANNTTTGGGGGGGGNNTTTTTTNGNNNANNNGGGGGNNCNTAANNTTT
AAAAACCCCNNTTCCNGGGGGGGNNTTTTTTTAAAAAAANNNACCCCNTTGNNCCNTTGGGAAAA
AAAAAA

| | |
|---|---|
| Sequence 1027 | cMhvSB103a03 |

TTGAACAAGCCGGTTGACGTCCAGTTCAAGGTAACGCTCGCCGCGGCGCATGGCCTCGGGGTTACC
GAACAGGAACAGAATACGGGTGCGGGGCTTGATCTCCCACGGGCAATGCCTTGCAGCAAGCGGTC
GGCCAATTCGATCGGCGCGGTTTCGTTGCCATGGATGCCNGACGACAGCANCACGTCGNTGCGTTG
TCCCGCGCCTNAAGAGGCCGCACTTCAGCGCGCCTTACTTGAGCCAAGCGCAGTTGCACCCCCGTN
NACAGTNANTTTGAATTTTTTTGCCCCCGTTCCNCGACCGGGCGAAGGGGTTAATTTCAANCCATT
TTTGCCCGNGGGGCGAAACATAAAAACAAATTTTTTTTTTGTNGGTTGCNANNCCAAANAACCGG
GGGACANTAAATCNNNNNTAAATAAANANTTAAAAAGGGGGGGNGTTNTTANAAAAAAANNANT
GGNCCCCCCCCGGGGGGNGGGNNGNAAATNNNAAATTTNTTTNTTTTNNCNNCCCCCCNTNGGGG
GGGGGGGGGGGGGGCCCNCCCNANTTTTTTTTTTTTTTTTTTAATAAAAAAANNANGNCCCCCCCC
CCCCAA

| | |
|---|---|
| Sequence 1028 | cMhvSB105g04 |

AGGTACCCGGNGNNNCCNNCATGGNCNNGGNCTNGAATTNCGCATNAGCANCTGNNTATNGANA
TACCTANGCCGGNAGAGGGANAACACANNTGGANAAAATCNGCAGNTGAAACNGCCTTGNCCGG
ACTTAACACTCANGCCTGTGAATCNGGAAATNCNAAGACCTCCAAAAAAGGACCANTTCCTNGGA
TGTGCCCCCTCACAGAGAGATGAANGGGCACCAGAAAACATCTGAAACGGAAGAGGGGACAGNG
CNTATTCAAGAANGTGCANNGGCTACTGGGGAAGACCCANCCAGTGNGGCTATTGCCAGCATCCA
GTCATCTGCCACCTTCCCTGACCCCAACGTCGAGTGATGTACCTGCCCG

| | |
|---|---|
| Sequence 1029 | cMhvSB020e08 |

GTATGCTTGAAACAACAACAGCTNTCATNGAATATTCAGAGAGTCCACTAGGTGCCAGGCAATGT
CTGAAGC

| | |
|---|---|
| Sequence 1030 | cMhvSB021e12 |

TGCAGAATTCGCCCTTTCGAGCGGCCCGCCCGGGAGGCTAAGGGAGGCTATGGGAGGCTAAGGGA
GGCTCANGTAAGGAGGATCTCTTGAGCCTGGGAGGCAGAAGCTGCAGTGAACCAAAATGGCACCA
CTGCACTCCAGCCTGAGTAACAGAGTAAGACTCTGTCTCAAAAAAAG

| | |
|---|---|
| Sequence 1031 | cMhvSB024c09 |

ACTTAAANTTTTTTTTTTTTTTTCNTTNTGNNNGGGNAAAAAATTTTTTNNTTNNNANCNNNNTTTN
TTTGGGCCNTTTTAANGGGGCNANTNTTTTTTT

| | |
|---|---|
| Sequence 1032 | cMhvSB026e11 |

CCCTTTCGAGCGGCCGCCCGGGCAGGTACTTTTTTTTTTTTTTTTTTTTTTTNGGGGAANGGTTNNN
AGGGNCNNNAAAACNNNGNGGGGNNGGGCCCCNAAAANGGGNNNGGGGNNNAAAAANNNTTTT
TNNNNANANNTNTNGGNNNNNNAAAAAAANNNTNNTTTTTTAAAAAAA

| | |
|---|---|
| Sequence 1033 | cMhvSB027h04 |

TGGATATCTGCANAATTCGC

| | |
|---|---|
| Sequence 1034 | cMhvSB029c09 |

CCCTTTCGAGCGGCCGCCCGGGCAGGTACGCGGGATNCNCACATGATCACACAC

| | |
|---|---|
| Sequence 1035 | cMhvSB031g11 |

CCCTTANCNNNGGCCCNNCCGACGNNCANGAGTGCTCTTNTGCAGGCCACAGGGG

| | |
|---|---|
| Sequence 1036 | cMhvSB041e10 |

GGGCGAATTGGAGCTCCCCGCGGTGGCGGCCGAGGCACTTTTTTTTTTTTTTTT

| | |
|---|---|
| Sequence 1037 | cMhvSB051c05 |

TCCCCGCGGTGGCGGCCGAGGTACTTTTTTTTTTTTTTTTTTTTTTTTTTTGAGACAGACTTTTGCTCT
TATTGCCCAGGTTAGAGTACAGTGGCACGATCTCAGCTCACTGAAACCTCCGCCTCCCGGGTTCAA
GCAATTNTCCTGCCTCAACCTCCCAAGTAGCTGGGATACAGTTGCCTGCCACCACACCCAGCTACT
TTTTGCATTTTTAGTANAAATGGGGTTTCACCATGTTGGCCAGGCTGGTCTTGAATTCCTGACCCCA
TGATCCACCCTCCTTGGCCTCCCAAAGNGCTGGGATTACAGGCGTGAGCCACTGAGCCTGGCCAAT
TTTTATTTCTGAAACATTTATTATTAATGNGANGGGAAAATTACCCAGAATATATGTTCATTTCTTA
TAAAGTTAAGTCTTCCAAAACCTGGTTTNACAAAAAACTGAGGGTAAATTCAGGGCTCAAATATA
NAAACTTAAACTTTTCTTGGNAATCCAATTAAAAATGTANNTCTTAGCTGGGCCAGGNGGGCTCAC
CCCCTNTAATCCCAGCACTTTGGGGNGGCCCCGGGGGGG

| | |
|---|---|
| Sequence 1038 | cMhvSB058b12 |

TTGGAGCTCCACCGCGGTGGCG

| | |
|---|---|
| Sequence 1039 | cMhvSB065b03 |

ACTTTTTTTTTTTTTTTTTTTTTTTTGGGGGNACNNGTTTTTNGGGGCNNNNNCNGGGNNNGGGGGG
GGCCCCCCCNANGGGGGNNGGGGCNTNNAANNNTTTTTTNNNNNNCNNTNTGGGGNCCCAAAAA
ANNNNNNNNNTTTTTAAAAAA

| | |
|---|---|
| Sequence 1040 | cMhvSB071c08 |

CCGGGCAGGTACTTTTTTTTTTTTTTTTTTTTTTTTTAAANNNGGGGAANGNTTTNNNGGGCNNNNN
NNNGNNCNGGGGGGGGGCCCCCNNAAAGGGGNCCGGGNNNNNNAANNGNTTTTNNNNNNCNGN
NNTGGGNNCCNAAAAAANNANNNGGNNTTNNAAAAAAAA

| | |
|---|---|
| Sequence 1041 | cMhvSB073f02 |

GGAGCTCCACCGCGGNGGCGGCCGAGGTACTTTTTTTTTT

| | |
|---|---|
| Sequence 1042 | cMhvSB079a09 |

GATTGGAGCTCCCCGCGGTGGCGGCCGAGGTACTTTTTTTTTTT

| | |
|---|---|
| Sequence 1043 | cMhvSB082h09 |

AGCTCCCCGCGGTGGCGGCCGAG

| | |
|---|---|
| Sequence 1044 | cMhvSB083h06 |

GGCNAATTGGAGCTCCCCGCGGTGGCGGCCGAGGTACTTTTTTT

| | |
|---|---|
| Sequence 1045 | cMhvSB087a11 |

CGGCCGCCCGGGCAGGTACAGCTACTTTGGAGGACAGTGTGGTGGTCTCTCATAATCCTAAACATA
CTCTTAGAATATGAACCAGCAACACTGCTCCCCAGTATTTACACAGATGGGTTGAAAACTTCTGCC
CACAAAGAAATCTGCACGTGCACGTTTATGGCAGCTTTCTTTATCACTGCCAAAAACTTGGAAGGA
ACCAAGATNTCCTTCAATAAATGTCTTACTACATTCTGGTTGTTGTAACAAAATACCATACACTGC
GTANCTGAGGCAGGAGGATCACTTGA

| | |
|---|---|
| Sequence 1046 | cMhvSB092a03 |

TTGGAGCTCCCCGCGGTGGCGGCCGAGGTACTTTTTTTTTTTTTTTTTT

| | |
|---|---|
| Sequence 1047 | cMhvSB093e09 |

TGGAGCTCCCCGCGGTGGCGGC

| | |
|---|---|
| Sequence 1048 | cMhvSB094g10 |

ACTTTTTTTTTTTTTTTTTTTAAGGGGTNANGNNTTAACNGGCNATANNNNNANCNGGGGGTNGGC
CCCCACAAAGGGNNCCGGGCNNANNAANNNTTTTTTANNAACAGGNATGGGNACAAAAAAATAN
CNNNNGNTTTTAAAAAAAA

| | |
|---|---|
| Sequence 1049 | cMhvSB095f07 |

TTGGAGCTCCCCGCGGTGGCGGCCGAGGTACTTTTTTTT

| | |
|---|---|
| Sequence 1050 | cMhvSB096a12 |

TAATTGGAGCTCCCCGCGGTGGCGGCCGCCCGGGCAGGTACTTTTTTTTTTTTTTTTTTTTTTTTTTN
ANGGGNCNAAAAAAATTTNNNTGGGGGGNNNNNGGNNCNTTTTTTTTTNAAAAANTTTNGNNCCA
AANNNAAANTTTTAAA

| | |
|---|---|
| Sequence 1051 | cMhvSB104f02 |

ACACATTGAAATCTGCAACATGCTGGGACTGCAGAGAGCCTGGGCTGGGAGTCGTGAGCTCCACC
CGGCTGTTTTTATGACAGCTGGCAAA

| | |
|---|---|
| Sequence 1052 | cMhvSB031h10 |

CCCTTANCNNNGNCNNGGCCGACGTNCTNAGCTCCACAAACGTGGNCNTGGTTGGTGCGGAANTG
ATTGTGAGTGANCAGGTAA

| | |
|---|---|
| Sequence 1053 | cMhvSB038d03 |

CCCTTAGCGTGGTCGCGGCCGAGGTACTTTTTTTTTTTTTTTT

| | |
|---|---|
| Sequence 1054 | cMhvSB038h12 |

CCCTTTCGAGCGGCCGCCCGGGCAGGTACTTTTTTTTTTTT

| | |
|---|---|
| Sequence 1055 | cMhvSB094a12 |

TCCCCGCGGTGGCGGCCGAGGTACTTTCATNNNTTTTACACCTACCTTTTTCTGGGNNGGGNTNTN
GACCNCNATGATGTGNGCTCTGGAAGGCNTGAGCCAANTNTTTTNTAAACTGACTCNANGAGAAC
GCTAGGGCTACAAANNGTCTNCTGAAGATACAAAACCAGCGTGGCT

| | |
|---|---|
| Sequence 1056 | cMhvSA002a07a3 |

GCCGCCCGGGCAGGTACAGAGCTGGAGGCCCAAACAGCCAGCCAAATCTTGCTGTATTTTATCCA
CCATAGTATAATCCAGAGACTGTGGACCCCNAATTGGGATGCTTTTAAAATCCAAAGTAGTTCTGT
ATACACATTTGAAGAAAAATGCTGTTGAAGAAATGTATCCATAAAACACTTCAGGTCAAAAAGCA
AAAGAATATCAAGAAAAAGTTTAAATAACATGATTCCTACTGGNTTTAGATCATAATTATCATCCT
ATATTATTTATATTCGGATCACTGGTATCTTTCTCTGACAAATAATTCTGAAATACAATACATTTTA
AAGTTATGCAGGATTTTAAAGACCTCGTCTTCAAGCAAATACCAGAAGTTTAATAACAAACTTTAA
ATAAATGCTCATTTAAATAAAAGTTTATNTTTCTCCTGGCCAAATATTTGGNGNATTCTTACAAAG
ATACTTTCAATGATTAGATTCCTTANCTTAAAAAAAAAA

| | |
|---|---|
| Sequence 1057 | cMhvSA002a07a4 |

CCCTTAGCGTGGTCGCGGCCGAGGTACAGGCGGAGGGGGCAGAAACTGACATCATGGAGTGTCAG
GCACGGTGCTGGTGCTATGCATACACTCAACAAGGGCCTGGGTAATGCAACATGGAGAAGGGAAA
ACTGGGGGGCAGAACAATTTTGTCGTCTGAAAGCCTTTCACAGAGAGGCCCTGAACCCATAGCTCT
CCTTCTCTGAGGACAGAAAAGGAGGAAGTGTGTCTGTCCTGCAGTATGTGGGATGGATAGATGGA
TGCNAAATTAAGCACTGAAGTGGGTTGCTTGGAGAGGCAATGACTGCCCCTGCCCTCACCTGAAA
ATCCTTAAAGACAGAAGGGATCATCCGCCCAGGAAGCTGAGGCTGCAGGATAAGCTGGC

| | |
|---|---|
| Sequence 1058 | cMhvSA002b04a4 |

CCCTTTCGAGCGGCCGCCCGGGCAGGTACAACCCTACCACTACTCTACATCATGGAAGTCTTAACG
ATTTAGGGTAATACGATAATGAGAATACCAATATGGATCTATTAAATGAGGAGCTGAGTAAGCTC
CAAATTTCCCTCTAGATTGGTAAGTCTATAATTTATTATATGAAATTCCTAATTATTACCATACTAA
GTTCAAAAGATTTTAACCCAAATCCTTTAGTAACTGATAAACCTCATTCTTAAGATTCTTGACAGA
AATAATCTTGATGAGCTTCTTCTCTTCATGATCTTTCCAATGCTGTTATAATTTTGAGGGAATTACT
CTTATTTTCATTAATTCTGTTGCAAGGAGGAA

| | |
|---|---|
| Sequence 1059 | cMhvSA002b09a3 |

CCCTTAGCGTGGTCGCGGCCGAGGTACTCCAGCTATCAAAGGAGAATAGCCTTTAAAACACCAGG
ATCCTGGTCGAGATGGTAGAGGTGGTCTGTTTGAATTTGGGTGAATAGAGGAAATGCCAGTTAAG
GGATAGCCATTCTACAGACAAAAATGCANCCGTCTATACTTTTACTCCGTGGTAATACATTATTTG
TATTTCTTCTTTCTTAAGCCTCTTGTCTGTTTGTCTTAAGNATTTGGCTTATGTATTTGTCACCTACA
TAAAATATGCTCACTAAAACGCCACTGACTTTAAGGAATTTTAAGTATGATTATATGTGGNCCTTG
TAGAAAAACCATCTTTAAAGNGTAAAAAAANAAGTTTTTTTAAAAAGCTAAATTAGAAACCAAAA
AAGATCTGAAAACTCTGGAATGNATACATATAGAAATGGGNTTTTTTGAGGACCNTATGCTCCTCT
TTGGGATANAAATGNGTCGAAAAGAGCAAATATCTTGNAAAAATCAACTACCAAGAATACCATCN
ANGTAATGCNATNTCNAAGCCCGTTCANTNCAANANAAAAAATTTTGGAGNTAACCCNAGCCNGT
GGGGNCCCATCCNAGANTCCCTTTNTTNTGGNAACGGGNGNANNAAAAATTNCNANAATGNCTGT
GGCCCCCCCGGNGTGTNGTGGGGGGGNCTCCNGGGNNTGGGGNNANNACCCCCCNTGGGAATTTT
TTNTNTT

| | |
|---|---|
| Sequence 1060 | cMhvSA002b10a4 |

ACTTTGCTACACGGCCGGGGGCCATTGAGACTGCCATGGAAGACTTGAAAGGTCACGTAGCTGAG
ACTTCTGGAGAGACCATTCAAGGCTTCTGGCTCTTGACAAAGATAGACCACTGGAACAATGAGAA
GGAGAGAATTCTACTGGTCACAGACAAGACTCTCTTGATCTGCAAATACGACTTCATCATGCTGAG
TTGTGTGCAGCTGCAGCGGATTCCTCTGAGCGCTGTCTATCGCATCTGCCTGGGCAAGTTCACCTTC
CCTGGGATGTCCCTGGACAAGAGACAAGGAGAAGGCCTTAGGATCTACTGGGGGAGT

| | |
|---|---|
| Sequence 1061 | cMhvSA002b11a4 |

GGTACAGTAGAATCTCTCTGAACTGACTNTGACAGATTTTTCTTTTTTCCCCCTATAGAAGTGCCAA
GAATGAGAAGGCTATTTTCTAATATGCCCACATGTGCATTTGTTGCATGTGTATGAANAGGGAAGA
CAGCTTCTTTGCTTAGCAAACCACTGGTTGTATGGGATGTAAACCCATGCTTATTAATGTAATTACA
TAATATTACATAAACTGACAAAATATGAATGTGAAAGCTATTTCAATGAGACTAANTCAATGCCA
ACTAATTAAAGGTTAAGTTTCTAAAAGAAAAAAAACTCACTCATATTAGGTATGTGTGACAGTTTT
AAAAGATTAAATAATAAAAATA

| | |
|---|---|
| Sequence 1062 | cMhvSA002c03a3 |

GTCGACCCACGCGTCCGNTTACATATAATGCAACTTATATGTAAGTTTCATCAACACAGANTGAGT
ATATAAGTTGGCTAAAAGNAGGNANTACCCATCTAACAGTACAATGCTGTCAGAGACCCAGGCTC
TTTCTGGCTTATTGTAATTCATTTCCTTAGCATGTTGGGTTTTATCTTCATTCTGTTCCCTTCACAGT
TGTGGAATTCCTGTTGCAGCTTCATTTTTTAAGGACACAAGGCAGGAAAGGGGAAGGGCAACTCC
ACACCGTGTCTGTCTTCTTATCTTTGAAATTGCAAAGCTGTCCCAGTTACCTTACCACCCTACCTTG
CTTCTCTAGCAGATTTCTCTTCCATAATTATTTAAAGCCCACCTGGGGGTCACTCCAGGGTTTANCA
AAAGGGTTANCGGTTATATTTGAAAACCTTTNGAAAATTNCANCCCCTCCCATAAGTAAAAAGAA
AGGGGCCAAGGGGGANGAAAAACGGGTGTTTNTGGTTTTAAGNNCAAGGTCGTAANATTGGNTCA
AAAAGGGAAGAATAAGCCCAAGNANTANTTCNTCTTTTTTTGNNGGAGGAATAAANCCANGACCA
CCTTGTTTGCANTTTNTAAAAAACCATGGGGTNATTAAACCTTTGGGGCCNTTTTAAAGGGGCCAT
TATTTTTCCTTTTTAAAA

| | |
|---|---|
| Sequence 1063 | cMhvSA002c11a3 |

CCCTTAGCGTGGTCGCGGCCGANGTACCCCTTTGCTGTTTGTCCCCCTCCTCCCGGGTCCTGGAGTC
CGTCGTGTTCCAACAGTTTTTGCTCTTATTCCCGTGGGCTGCCTGGGCCTCCTTTCACCCGTGAGAC
TTGGAGCGGCCCCTGGGGTCTTGGGTGTGCAGCACGGATCACGCGAGACCCCTGAGACCTCAAAT
CATCTAACGTGAAGCCACAGACATCTTGGGCAATTTTAATCATCAAGAAAGAAATATGTCATTAAG
AAATAGCAGGGTATTTTGAAAGAGTTGGAAAACATCATGAATTTGAATACTTCAAGTAATACTGGT
GATACCCAAAGGTTGAAGAATGCCTCATTGGATGTAAAACAAATACTTAAAAATGAAACAGAGTT
GGATATTACTGATAATCTCAGGAAGAAACTCCATTGGGCTAAAAAAGAAAAGTTAGAAATAACAA
CCAA

| | |
|---|---|
| Sequence 1064 | cMhvSA002c11a4 |

GGTACCCCTTTGCTGTTTGTCCCCCTCCTCCCGGGTCCTGGAGTCCGTCGTGTTCCAACAGTTTTTG
CTCTTATTCCCGTGGGCTGCCTGGGCCTCCTTTCACCCGTGAGACTTGGAGCGGCCCCTGGGGTCTT
GGGTGTGCAGCACGGATCACGCGAGACCCCTGAGACCTCAAATCATCTAACGTGAAGCCACAGAC
ATCTTGGGCAATTTTAATCATCAAGAAAGAAATATGTCATTAAAAAATAGCAGGGTATTTTGAAAG
AGTTGGAAAACATCATGAATTTGAATACTTCAAGTAATACTGGTGATACCCAAAAGGTTGAAGAA
TGCCTCATTGGATGTAAAACAAATACTTAAAA

| | |
|---|---|
| Sequence 1065 | cMhvSA002e02a3 |

AGANACTTGAACAATTGGTTTATTTCTAAAAAGGGTGACATTTATAAGTATTCATGCAGCATTTGA
GTCCCTATTGGTGAGTGAGCAGACTATCCAATACTCATTGGCCCTCTGGCACAACAAAATTAAAAC
AAATAAACAAAAATCCGTGACTACCTAGGGTTGCTAGGATTGCTTAAGAAGAGTCTAAAGTTCTGT
TATACATGTGAACGCAGAGGACCCACATGCCGAGCTATTGTTTCTTTGG

| | |
|---|---|
| Sequence 1066 | cMhvSA002e03a3 |

TTTGTCTTCCATCCCTAATCCTTGATCAATCCAATCATTCATTTTGTCTCTTCTTACACAGCCTGTAG
AAAGAAAAAGACTGCATAACACTGAAGAAGTGTGGTTACAAAGTTACGACTTCCTGGCTGGGCGC
AGTAGCTCACGCCTGTAATCCCAGCACTTTGGGAGGCTGAGGCAGGCGGATCACGAGGTCAGGAG
ATNGNNACCATCCTGGCTAACGGGGTGGAACCCCGTCTCTACTAAAAATACAAAAAATTAGCTGG
GTGTGGTGGCGGGTGCCTGTGGTCCCAGCTACTTGGGAGGCTGNNGCNNGAGAATNNCGTGAACC
GGGGAGGCGGAGCTTGCAGNGAGCCGAGATCGTGCCACTGCACTCCAGCCTGGGTGACAGAGCGA
GACTCTGTCTCAAAAAAGA

| | |
|---|---|
| Sequence 1067 | cMhvSA002e08a3 |

CCCTTAGCGTGGTCGCGGCCGAGGTACTCCAGCTATCAAAGGAGAATAGCCTTTAAAACACCAGG
ATCCTGGTCGAGATGGTAGAGGTGGTCTGTTTGAATTTGGGTGAATAGAGGAAATGCCAGTTAAG
GGATAGCCATTCTACAGACAAAAATGCAGCCGTCTATACTTTTACTCCGTGGTAATACATTATTTG
TATTTCTTCTTTCTTAAGCCTCTTGTCTGTTTGTCTTAGGTATTTGTCTTATGTATTTGTCACCTACAT
AAAATATGCTCACTAAAACGCCACTGACTTTAAGGAATTTTAAGTATGATTATATGTGGTCCTTGT
AGAAAAACCATCTTTAAAGTGTAAAAAAAGAAGTTTTTTTAAAAGCTAAATTAGAAACAAAAAAG
ATCTGAAAACTCTGGAATGTATACATATAGAAATGGTTTTTTGAGGACCATATGCTCCTCTTTGTA
ATAC

| | |
|---|---|
| Sequence 1068 | cMhvSA002e08a4 |

CCCTTAGCGTGGTCGCGGCCGAGGTACTCCAGCTATCAAAGGAGAATAGCCTTTAAAACACCAGG
ATCCTGGTCGAGATGGTAGAGGTGGTCTGTTTGAATTTGGGTGAATAGAGGAAATGCCAGTTAAG
GGATAGCCATTCTACAGACAAAAATGCAGCCGTCTATACTTTTACTCCGTGGTAATACATTATTTG
TATTTCTTCTTTCTTAAGCCTCTTGTCTGTTTGTCTTAGGTATTTGTCTTATGTATTTGTCACCTACAT
AAAATATGCTCACTAAAACGCCACTGACTTTAAGGAATTTTAAGTATGATTATATGTGGCCTTGTA
GAAAAACCATCTTTAAAGTGTAAAAAAAGAAGTTTTTTTAAAA

| | |
|---|---|
| Sequence 1069 | cMhvSA002f05a4 |

GGTACTCCCTCTCCCCTCCCTATCTCAGGAATGAAGCTTCTGTGTCTGCTACAAGCCTCCAATGCCA
CAATGCAAGCTGTTGAGGGGGCTCTTCTTCAACACCTATGGGCCTGAAAGATTCCAGCCACCCAAG
ATCTTCAGCCCTGAGGTTGGAAACTGACCTGGGGGCCTCAGCTTGCTGTGACTGTCACTGCCCATG
TGTTCTTCCCCATGCCTCACCTTCCTCCTCCAAGTGCGTGAAACATCAATGAACCTTGTGCTTTTGT
CGTGTGATCTGTACACCCCATC

| | |
|---|---|
| Sequence 1070 | cMhvSA002g10a4 |

CCCTTAGCGTGGTCGCGGCCGANGTACTAACATCAATAAGTCGAGAAAATTATATTAACTGAAAG
AAAACAAAATAATAGAGAATTTTATTAAACGTATTTCTAATGTTTCTCTTCATGTTTGGAGAAAAG
CTGCCACATAATTAAAACAATTCTTACCCTGTAAAACTGATTGTCTTCCAATCTCAGGAGGTTTAC
ATTAACAGGAATATAGAATAAGAAACAGGCCTATGGCCGAGCTCCGTGGCTCACGCCTGTAATCC
CAACACTTTGGG

| | |
|---|---|
| Sequence 1071 | cMhvSA002g11a3 |

CCCTTGCACTGTGACAAGCTGCACCTGACGCTCATCCTGCTCCATTATTGCCTGACCACTAAGCTG
AAAAACGGTGTAAAACCAGGCATCGTCGCTGCCTTTTACTTCCTGCCAGGTGCGGGATAAATTCAC
CCCGCTGGTTGTCACGGTACTCAGCTTTAGTCCTTTGGCNAAATGCGTGTCCAGTACACCCNTGTA
ACGCTNANTCAGCAGGCGTCCGGNAAAATTTCCGCATACCTGATTGATTNGGGAAAGCCATTGCT
GAAACTCATTATCCACTGCGGGGTTCATGGCACGTTTTCGCTCTGTGAAATGTATTTTTATTGTTGC
ATTTGTGTTGCAATAAACGAAGCTAATGAGCCTGACTATAGGAAATAAGTCTTGTCAGGCATAGA
GACATAAGCGGTTATTGTCACGATTTGCGGAGCTTGTCACAGCTGACAANAGCGAATGTCACAGC
GAAAAAAGTGACTTTTCTTGTCGCTGCGTACACTGAAATCACACTGGGTAAATAATAA

| | |
|---|---|
| Sequence 1072 | cMhvSA002h09a3 |

CCCTTGCACTGTGACAAGCTGCACCTGACGCTCATCCTGCTCCATTATTGCCTGACCACTAAGCTG
AAAAACGGTGTAAAACCAGGCATCGTCGCTGCCTTTTACTTCCTGCCAGGTGCGGGATAAATTCAC
CCCGCTGGTTGTCACGGTACTCAGCTTTAGTCCTTTGGCAAAATGCGTGTCCAGTACACCCGTGTA
ACGCTCAGTCAGCAGGCGTCCGGTAAAATTTCCGCATACCTGATTGATTTGGGAAAGCCATTGCTG
AAACTCATTATCCACTGCGGGGTTCATGGCACGTTTTCGCTCTGTGGAATGTATTTTTATTGTTGCA
TTTGTGTTGCAATAAACGAAGCTAATGAGCCTGACTATAGGAAATAAGTCTTGTCAGGCATAGAG
ACATAAGCGGTTATTGTCACCGAATTGCGGAGCTTGTCACAGCTGACAAAGCGAATGTCACAGCG
AAAAAAGTGACTCTTCTTGTCGCTGCGTACACTGAAATCACACTGGGTAAATAAT

| | |
|---|---|
| Sequence 1073 | cMhvSA002h11a3 |

CCCTTGCACTGTGACAAGCTGCACATCCATATCGCCATCAACAAGATTCACCCGACCCGAAACACC
ATCCATGAGCCGTATCGGGCCTACCGCGCCCTCGCTGACCTCTGCGCGACGCTCGAACGGGACTAC
GGGCTTGAGCGTGACAATCACGAAACGCGGCAGCGCGTTTCCGAGAACCGCGCGAACGACATGGA
GCGGCACGCGGGCGTGGAAAGCCTGGTCGGCTGGATCT

| | |
|---|---|
| Sequence 1074 | cMhvSA003a06a4 |

CACATTCTACTCTACCATTCCTTTGCCCATTTTAATTTTTTTAAGACACAGATATCCTTAAAACTTTT
TATCAGTTCTTCATCAGATTTAGGATGCAGTTAGATTTTTCTCTCACTCCATACACCAACAATAATT
GTAAATAAATTAGAAATTTAAATGTAAAGCAAGAAATCATGTAAGTCCCAGCCAAAAATTTGAAT
AAATATGTAATCTTTGTGTGAAGAAAACTTTTTAAAAACAGCAACAAAGACAGACTATTAAGGAA
TGTAAACTGAGGAAAATATTTGCAATATATGGCAGGCAAAAAGTTAGTAGATTTAACATAGAATT
TTATTTTTGTTAGGAT

| | |
|---|---|
| Sequence 1075 | cMhvSA003b01a3 |

CCCTTGCACTGTGACAAGCTGCACAACAGAGTGATTTGATTAACGTCGCCCAACTGACGGCGCAAT
ATTATGTACTGAAACCAGAAGCAGGGAATGCGGAGCACGCGGTGAAATTCGGTACTTCCGGTCAC
CGTGGCAGTGCAGCGCGCCACAGCTTTAACGAGCCGCACATTCTGGCGATCGCTCAGGCAATTGCT
GAAGAACGTGCGAAAAACGGCATCACTGGCCCTTGCTATGTGGGTAAAGATACTCACGCCCTGTC
CGAACCTGCATTCATTTCAGTTCTGGAAGTGCTGGCAGCCGAACGGCGTTGATGTCATTGTGCAGG
AAAACAATGGCTTTACCCCGACGCCTGCCATTTCCAATGCCATCCTGGTTCACAATAAAAAANGTG
GCCCGCTGGCAGACGGTATCGTGATTACACCGTCCCATAACCCGC

| | |
|---|---|
| Sequence 1076 | cMhvSA003b05a4 |

ACGCGGGACACATTCAGAGGTGAGCCCAGAGCGGGTAAAGTGGACTGGGGAGAACTTCGGAGGA
TGTTCATGTCCAGGAGCAGCCCCACGCCCTGTATGGTCGGTGTCTAGAGCCTCACAGCAACTAAGA
CCAACCCAGCTCTCAGAAGAAGGAATGTCAAAATGTCATGTTCAATTTTACATTCAGTGCCTGGAA
TCTTTTCTTCACAATTGAAATGAAATGTGCTGAAGGAGGTGAATCCATGCATTAATCTTCAGCTCA
CAAAGGAAATACTACATAAGAAGCAAGACCACAGACTCAAGACGGACATAATTGGATTTTTTTTG
CCATGGCCTGG

| | |
|---|---|
| Sequence 1077 | cMhvSA003b09a4 |

CCCTTTCGAGCGGCCGCCCGGGCAGGTACACACAGTTAACCACAAAACAGGCCTCTCTGAAAAAG
CCATTGCCATGGACTGCCAGACAGACAATGACAAGACACAGAATACCTTCTGGTGTGTGAGCCAC
GGGACATGTGAGCTTCCCCGCTGATGCTCCTCTTATATCAAAGATCACTTTCACAAGATGAGCGAC
TCAATATCTTTTATCAAACCAATGATCACCTGCAAGCTATGGTATATTTTTGCAGCTGTGTAGAGCT
ATGTGGCATGAGAATGTGGGACTTATAAATTGCTGATCCAATAAATAGACATTATGGGCAACAGT
GTCTTATCAGCTAGTGTGTACTAAGGTTTCANGAACAGTTGTTCTGACCTTACTATCCAACGAGGA
GTAAC

| | |
|---|---|
| Sequence 1078 | cMhvSA003e01a3 |

TTTCGGAGGCCGGGNTCGGCCCTGTGTGCNATGTGTTACCCNTNTCACCANATTACCATTTTGGGC
CAAGATTCTGAAAAGCCTACTAAAGCNACNACAGTAGGACCCAAGGAAATAAGCCNATAGTTATG
TAAAAAAGGCCTTATTGTAAAACAAACCCATTTTTTTTAAGGGGAGAAGCCTTAGGTATTTTAAGC
AAGTTTCCANAAGGACCCCCAAGGCCATGTTTGGAAGNGNACCANAAGAAAGGGGCCTTTCTTTG
TGGTGGAACCTTGGTCCTNGNGGGNGGAATTTTTTCCAATCTCTGGGGAAAAAGGTTCCTTGGGGA
AGNAATTTTGGGGNGGCCCCTTTTTTTTAANAAGAAAAAGGGGGGAACCAAAAAAAACCTTAAAA
GGGGGGTTAAAAGGTTGGNAAAACCTTTTTTGGGGGTTTTCCTTTAAGGGGAAAAATTGGGGNCC
AAANGGAAATTCCATGNTCNAAAAGGAAAAAGNNAATTCCACCCCCAGTNGTNGGCCCCCAAAA
CCTTTGGTTTAAGGNCCCCTTTTTTNACCAANCCAAAATTGGGTTCCAATTTAAGGCCCAAGGCCC
CCCAAAAAATTTTCCAAGGTTCCAAGGCCTTAATTTTGGGAAAATTTTAAAAAAGCCTCTTTTAAT
TTTGGGGTCCCTTAAACCTTTTTGGNCCCCA

| | |
|---|---|
| Sequence 1079 | cMhvSA003e05a3 |

CCCTTTCGAGCGGCCGCCCGGGCAGGTACGCGGGACACATTCAGAGGTGAGCCCAGAGCGGGTAA
AGTGGACTGGGGAGAACTTCGGAGGATGTTCATGTCCAGGAGCAGCCCCACGCCCTGTATGGTCG
GTGTCTAGAGCCTCACAGCAACTAAGACCAACCCAGCTCTCAGGAAGAAGGAAATGTCAAAATGT
CATGTTCAATTTTACATTCAGTTGCCTTGGAATCTTTTCTTCACAATTGNAAATGGAAATGTGGCTG
CAAGGGGAGGTTGAAATNCCATTGCNATTAAGTCNTTCAAGCTCACAAAGGGAAATTACCTACCA
TAAAGAAAGNCANAGGACCCACAGNACTCCAANGACCGGGACCATTAAAATTTGGGATTTTGTTT
TTTTTGCCCANTGNGCNCCTGGGGAAANAGAAAAAGGGTTAACNCTTNCGGGCCCGGCGGACCCA
CCGNCCTTAAAGNGGGCCGNAAANTTTCCCANGGCCACCACCTTGGGCCCGGGGCCCGNTNTAAC
CTTAAGATGGGGAATCCCCGANGNCTTCCGGGTTTANCCCAAAGGGCTTTGGGGG

| | |
|---|---|
| Sequence 1080 | cMhvSA003e11a4 |

CGCGGGGACACATTCANAGGTGAGCCCAGAGGGGGTAAAGTGGACTGGGGAGAACTTCNGAGGA
TGTTCATGTCCANGAGCAGCCCCACGCCCTGTATGGTCGGTGTCTANAGCCTCACAGCAACTAAGA
CCAACCCANCTCTCAGAAGAAGGAATGTCAAAATGTCATGTTCAATTTTACATTCAGTGCCTGGAA
TCTTTTCTTCACAATTGAAATGAAATGTGCTGAAGGAGGTGAATCCATGCATTAATCTTCAGCTCA
CAAAGGAAATACTACATAANAAGCAAGACCACAGACTCAAGACGGACATAATTGGATTTTTTTTG
CCATGGCCTGGAAA

| | |
|---|---|
| Sequence 1081 | cMhvSA003f04a3 |

ACCTTTCTTTCCAGGCCATGGCAAAAAAAATCCAATTATGTCCGTCTTGAGTCTGTGGTCTTGCTTC
TTATGTAGTATTTCCTTTGTGAGCTGAAGATTAATGCATGGATTCACCTCCTTCAGCACATTTCATT
TCAATTGTGAAGAAAAGATTCCAGGCACTGAATGTAAAATTGAACATGACATTTTGACATTCCTTC
TTCTGAGAGCTGGGTTGGTCTTAGTTGCTGTGAGGCTCTAGACACCGACCATACAGGGCGTGGGGC
TGCTCCTGGACATGAACATCCTCCGAAGTTCTCCCCAGTCCACTTTACCCGCTCTGGGCTCACCTCT
GAATGTCCCCGCGTACC

| | |
|---|---|
| Sequence 1082 | cMhvSA003f04a4 |

CCCTTTCGAGCGGCCGCCCGGGCAGGTACCTTTCTTTCCAGGCCATGGCAAAAAAAATCCAATTAT
GTCCGTCTTGAGTCTGTGGTCTTGCTTCTTATGTAGTATTTCCTTTGTGAGCTGAANATTAATGCAT
GGATTCACCTCCTTCAGCACATTTCATTTNAATTGTGAAGAAAAGATTCCAGGCACTGAATGTAAA
ATTGAACATGACATTTTGACATTCCTTCTTCTGAGAGCTGGGTTGGTCTTAGTTGCTGTGAGGCTCT
AGACACCGACCATACAGGGCGTGGGGCTGCTCCTGGACATGAACATCCTCCGAAGTTCTCCCCAGT
CCACTTTACCCGCTCT

| | |
|---|---|
| Sequence 1083 | cMhvSA003g07a4 |

CCCTTTCCAGCGGCCGCCCNGNCANGTACGCNGNGAGAGGGGGTAAAGTGGACTGGGGANAACTT
NNNANGATGTTNATNTCCAAGAACAGCCCCACNCCCTGTATGGTCNGCGTCTATANCCTTCAGCNA
CTAAAACCAACCCATCTCTCAGAAAAAGGAATGTNAAAATGTCATGTNCAATTTTACATTCAGNGC
CTGNAATCTTTTCTTCACAATTGAAATGAAATGTGCTGAAGGAGGTNAATCCATGCATTAATCTTC
AGCTTACANAGGANATCTACATAAGAANCANGACCCAGACTCAAGACTGGACATAATTGGATTTT
TTTTGCCA

| | |
|---|---|
| Sequence 1084 | cMhvSA003h01a3 |

TGCACTTCAAGAATGCCGCCAGACAGATAGATAAACTCTTCGTGACCGTGCTGTTTCACGATGCGA
ATCATACCAGGCTTAATGGCGGTGAGCAGCGGTGCGTGGCCAGGGTAGATCCCCAGTTCACCTTCG
CTACCCGTTACCTGGATTTTCTCGACCAGACCAGAGAACATTTGTTGCTCTGCGCTGACGACGTCC
AGGTGGTAAGTCATTGCCATATCACCCTCCGATTAAGGCGTTAAAGTTTTTTGGCTTTTTCCACAGC
TTCTTCGATGGAACCGACCATGTAGAACGCCTGCTCCGGCAGGTGATCGTATTCGCCTTCCATGAT
GCCTTTAAAGCCACGGATGGTGTCTTTCAGGGAGACGTATTTACCCGGAGAACCGGTGAATACTTC
TGCCACGAAGAACGGCTGGGACAGGAAGCGCTGGATCTTACGAGCACGCGCTACCACCAGTTTGT
CTTCTTCAGACAGTTCATCCATACCCANGATGGCGATGATGTCTTTCAATTCCTGATAACCGTTGCA
G

| | |
|---|---|
| Sequence 1085 | cMhvSA004a09a3 |

GGTACTCGGGGACATTCATAGGTGAGCCCAGAGCGGGTAAAGTGGACTGGGGANAACTTNGGAG
GATGTTCATGTCCAGGAGCAGCCCCACGCCCTGTATGGTCGGNGTCTAGAGCCTCACAGCAACTAA
GACCAACCCAGCTCTCAGAAGAAGGAATGTCAAAATGTCATGTTCAATTTTACATTCAGTGCCTGG
AATCTTTTCTTCACAATTGAAATGAAATGTGCTGAAGGAGGTGAATCCATGCATTAATCTTCAGCT
CACAAAGGAAATACTACATAAGAAGCAAGACCACAGACTNAAGACGGACATAATTGGATTTTTTT
TGCCATGGCCTGGAAAGAAAGGTACCTGCCCG

| | |
|---|---|
| Sequence 1086 | cMhvSA004b04a3 |

CCCTTAGCGTGGTCGCGGCCGAGGTACTGGCACANACTGCANCCTTGGTGACTCTCCCAAACACAG
GACACTGTAGGATGAAACCAGAGTGTGTGATCTCCAGTCACTANACATTGCTGAGGGTTTAAAAG
CCTGCCTGCTTGTGAATATCCTTCCGGTCTTTTTTCCTTAAGGGCAAAGCATCATCCATTCCTATTT
GGAAGTGAGGCTTGAGTTTCACCTTGAAAATGCAGCAATTTGCACCGCTATGCTGTATGCCTCTTA
TATACTACATTTATGATTGNCAGAATTTAATCCTATAGAATGCTAAAGAACCAACCTGCAAAAGGT
CTTGTCTATACCCTCCTCTCCCCCACCTCA

| | |
|---|---|
| Sequence 1087 | cMhvSA004b06a3 |

CCCTTTCCAGCGGCCGCCCNGGCNGGNACACACTAGCTGATAAGACACTGTTGCCCATAATGTCTA
TTTATTGGATCAGCAATTTATAAGTCCCACATTCTCATGCCACATAGCTCTACACAGCTGCAAAAA
TATACCATAGCTTGCAGGTGATCATTGGTTTGATAAAAGATATTGAGTCGCTCATCTTGTGAAAGT
GATCTTTGATATAAGAGGAGCATCAGCGGGGAAGCTCACATGTCCCGTGGCTCACACACCAGAAG
GTATTTGTGTCTTGTCATTGTCTGTCTGGCAGTCCATGGCAATGGCTTTTTCAGAGAGGCCTGTTTT
GTGGTTAACTGTGTGTACCTCGGCCGGACCACGCTAAGGG

| | |
|---|---|
| Sequence 1088 | cMhvSA004d06a3 |

NAGGTACTGGTCTGCCTGAAGGCTGAGGGCAGTAAAATNATTGACATTACTATAATACTGACCTCA
ATCGAGCTAACCTTTAAATTCTGAGAAACAGGTTTTCAAACAGGTTTATAGGCCAAANAGAGTCTG
GAACACCCTAAGGGCTTGGTTTTCCTGGCCAAGTAATCAGTCAAAGCTATTACTGNCACTCTGCCT
TTTCCTTGTGGCTANATAACACAGCCCAAGTGCAGTTGCCAATTTCTAATGAATACTANGTGTGGC
CTCCATTTTATCCTGTGCAAGGGGATATTGGAAATCTTTGTTCGAAGCAATATCCACGAGAGAGGN
GGCTTCATNCCTCAAAAGTTAAGGTGGATTTTAAANCAANTTNGGCTGCTTTTTAACCAAAATTAC
AGNATGGGNTATTGGANGGGCCNAATAAAATATTTAATAAGGANGNCTAAATAAATGNTTGNAAA
ANNTTTT

| | |
|---|---|
| Sequence 1089 | cMhvSA004d09a3 |

GGTACTTATGGTGTGATGCCCTCAATCTGGGATTTGCTAAGACATGCAGCAGGACAAGTCCATCCC
ACGGCATCTAAGACATCCATGGGAAATGCCCTGAGGTCTTACTTTTTGCATTTGTTTTAGCAGAAC
AGAAACTGGGAGGAGGGAGTTAAAAGAGCTGATGGAATCCTTTTCTCAGCTTCTCCAAATCTCTGA
GAAAATAATTTATTTCACATCAAATATTGGAAGTGAAAACTCAATGGACAAAAAACAAACAAAAA
AATACATGATGTCCATCAAAATGTTGACCTCTTCAAGGCATGAAATAAAAGGGAGCAAAGCNGGT
AATATTAATATACCAGAAAAGCCAGTAAGTTTTGTTTTACCGTTTATGAANACCTACTACCTCCTGT
TTTC

| | |
|---|---|
| Sequence 1090 | cMhvSA005a02a3 |

NCCCTTAGCGTGGTCGCGGCCGAGGTACCTCTCATTTGCCACTTTTCAACACTTCCTGGCAGGCAG
GCAGCATAACTGGTCCTGCTGGGTGATCCAGACCACACTCTGCAACTCTTTCTTCTGAGCCAGGCT
CCCCTACTGTCTTTTCATTTATGTCAAGGCAGGGGAAGACCTCAAAGGGCTCTTGCATCCCAGTCT
CACTTCCCAGAGAGGCACGAGGCCCTCCAGGATGTGGGGACAGGAACTTTGGGGCAAGCCGGGGT
TGTCCANAANAATACCANGAGGGCTGAATAGTAGAAAGGANAAGTCTTATTGGTGATATGTTTGC
AAACTGGGAAAAGATAGCCTNCANTGTGGAGCAAANATGCTCCTTCTTCAAAAAGGGCAAGGGCA
GCTTGGATTT

| | |
|---|---|
| Sequence 1091 | cMhvSA005a11a3 |

CCCTTAGCGTGGTCGCGGCCGAGGTACTCCCTCTCCCCTCCCTATCTCAGGAATGAAGCTTCTGTGT
CTGCTACAAGCCTCCAATGCCACAATGCAAGCTGTTGAGGGGGCTCTTCTTCAACACCTATGGGCC
TGAAAGATTCCAGCCACCCAAGATCTTCAGCCCTGAGGTTGGAAACTGACCTGGGGGCCTCAGCTT
GCTGTGACTGTCACTGCCCATGTGTTCTTCCCCATGCCTNCCTTCCTCCTCCAAGTGCGTGAAACAT
CAATGAACCTTG

| | |
|---|---|
| Sequence 1092 | cMhvSA005b11a3 |

CCCTTAGCGTGGTCGCGGCCGAGGTACGCGGGCAAACTCATTAGCAAAGCACACAAAGACCTTTG
TGATGTGGTATTGCTGAATTAAACTACTGGCAGCCCTAGAAAGGTAAAGTGTATTTGATGCTTCTG
TGCTGTTCCCTTAGCCCAGAAAGCCCTTCCAGTTTCTGTTTAGTAAAGTCCTATTCATCTTTCACTA
CTCAATGAGTCATAAGTAATCCCATTAGGAAAGCCTGTGTGATCTACCTCCTCCCTAATTTGCCAG
CTTGAGTTTGCTTCACCCCTTCATAATACTCAAGNCAATCATAATGTCTTATAATCCATCATAGCAC
CTNACACAATGA

| | |
|---|---|
| Sequence 1093 | cMhvSA005c01a3 |

CCCTTAGCGTGGTCGCGGCCGAGGACTGACTGCTACTGGTAGACCTAGGGTCAGCTTTGAGGACTG
AGGTAACCACCACAGGAAATAAGTTTTGAGGTCTGATTTTGAAACAATATTGGAAGACCATTCCTT
TGTGAGATAGAAACTTCTCCATTTTAATTTTAGTATTTTAAGCTTTTCCTACAGGTCAGTTGGGAAT
AATTTTTATTTAGGGACTCACAATCTTGAATTTTTAGCTAAATGCCTTAAGAATAAAATATTATTTA
AAAAGTATTAAAATGCTGTGATTNCAAACAGTTTCTTGTTCAAGATGAAGAATATAAAAATATACC
ACCATGTCTCGGCAACTGGAAAAGCAGATTTTAATTTTCATTCCAAAAATGGGAGACTGA

| | |
|---|---|
| Sequence 1094 | cMhvSA005c10a3 |

CCCTTAGCGTGGTCGCGGCCGAGGTACTTTGCTACACGGCCGGGGGCCATTGAGACTGCCATGGA
AGACTTGAAAGGTCACGTAGCTGAGACTTCTGGAGAGACCATTCAAGGCTTCTGGCTCTTGACAAA
GATAGACCACTGGAACAATGAGAAGGAGAGAATTCTACTGGTCACAGACAAGACTCTCTTGATCT
GCAAATACGACTTCATCATGCTGAGTTGTGTGCAGCTGCAGCGGATTCCTCTGAGCGCTGTCTATC
GCATCTGCCTGGGCAAGTTCACCTTTCCTGGGA

| | |
|---|---|
| Sequence 1095 | cMhvSA005d06a3 |

CCCTTGAGCGGCCGCCCGGGCAGGTACTGATTAATTACTGCAGTAACCTGGCAAAGAGATCTCTCA
AAAGCCCTGCAGCATCAAGGTTTTTATGAATGGCTTAGATGAGGTGGATACAGCATTCCTGACTTG
TCGAGTCTTANAAACACAAAGCTACTGCTACAAGAGTGGCCATGGGGTCCCAAAAGAGTCTTTAC
ACACATTACAAAAGGCTAAATCTAAAAGGATTCAACATAATAAGGTAAGTGGAAGTTCCGCCTGG
AACTCCCAGAAATTTAGTTGCTCACAAAAAAGCCAAAGGCCAATTCAGTCTTAATCTGATACACTA
GAAGCACAGGGTCAAAACAGGATGATCTTCCCTGTCGCTTATCCCCCG

| | |
|---|---|
| Sequence 1096 | cMhvSA005e08a3 |

NCCCTTTCGAGCGGCCGCCCGGGCAGGTACTTCTGGGTCTAATTACCAAATTGGTCCCAGGGCAGA
GAACTCTCTCTCCTGCATTGCAGGGGATGCCTAGGCAGTGTGTAGGCCTAAGCCTGANAACTACCC
AGGCCTTCCCATACTTTGGAAGCAGTTGACACTTGACTTCTTGGTTTCCATCTTTGCACTGTGCTGT
GTAGCCCTGTGTGTAAACAGCAGGCACTCATGTGCCATTGACTCAGGGTCAGAAGCACCACAGCA
TTGACTGTGTGCTCTCTGACTGAGGNGGGAACTGCGGCANCACTGGGTAACAGGTTGGACTGAAG
TTGGTCTCATTTGGAGAGTGGGGAGCAAGG

| | |
|---|---|
| Sequence 1097 | cMhvSA005f03a3 |

CCCTTAGCGTGGTCGCGGCCGAGGTACGCGGGGAGAGAACTCATGAGTTTTCCGCTTCATCGTCTG
CTTCTGTTTTCTCCATCTTAGTTTGCCCAAAGCTTGCTGGCCGCTGTGTAGGGCTGGTGAGTGGCTG
GGGCTGTCTGAGCCATGAACAACTTCAGGGCCACCATCCTCTTCTGGGCAGCGGCAGCATGGGCTA
AATCAGGCAAGCCTTCGGGAGAGATGGACGAAGTTGGAGTTCAAAAATGCAAGAATGCCTTGAAA
CTACCTGTCCTGGAAGTCCTACCTGGAGGGGGCTGGGACAATCTGCGGAATGTGGACATGGGACG
AGTTATGGAATTGACTTACTCCAACTGCAGGACAACAGAGGATGGACAGTATATCATCCCTGAT

| | |
|---|---|
| Sequence 1098 | cMhvSA005g08a3 |

CCCTTTCGAGCGGCCGCCCGGGCAGGTACCAAGTGTCCCCAAACCACCAAATTCTGAATGCCCTGA
GCTGGCTGAATGCAGACCAAAGACTGGGTGACTGACCATTGGGAAGGCACTCGACACTGTGGACA
GGTTAAACGGTTGATCCCCAGCTGTTCTGAATAAATGTCCACATGGGTTGATTGTAGAGCTAAGTG
AAGCAACTCCAGTGGAAAGGCCACCTTTTGAAACTACTGAAGCCACAGAAGGTGTCGAAGATGAA
GTTGGTGTAGTAGAGGAGGCTGCTGAGGATGGTAACCGTTCTCCAGACTCCATATTGTGATCAATG
TGGTCAATCTTGTGACATCACTTGTTGGGAAAC

| | |
|---|---|
| Sequence 1099 | cMhvSA009b08a2 |

ACTAACATCAATAAGTCGAGAAAATTATATTAACTGAAAGAAAACAAAATAATAGAGAATTTTAT
TAAACGTATTTCTAATGTTTCTCTTCATGTTTGGAGAAAAGCTGCCACATAATTAAAACAATTCTTA
CCCTGTAAAACTGATTGTCTTCCAATCTCAGGAGGTTTACATTAACAGGAATATAGAATAAGAAAC
AGGCCTATGGCCGGGCTCCGTGGCTCACGCCTGTAATCCCAACACTTTGGGATGCCGAGGCGGAC
GGATCACGAGGTCAGGAAATCCAGACCATCCTGGCTAACGCGGTAAAACCTAGTCTCTACTAAAA
ATACGAAAAAAAAAAAGGAAGGAAGGAAAAAA

| | |
|---|---|
| Sequence 1100 | cMhvSA009e06a2 |

ACACGTGGAAGTTACCCCAGTGCCTCCCACTTTAGACTACAGGTCATAACTCGGTGTGGGAGTAGA
GCCATTCCACCCATGGCCAGGAAAGCTGTGCCCAGTTACAAGTCCTGTGACGCCTTAACATAGGAA
TAGTTCTGTTTTTCAAACAAGTTGTCGAGAAGTTACCAAGAAAATAAAGAACCTTCTTCCCACAGA
AGAAGGCAGCCAGAATACCCAAGTCCTAGAAAACACTATATTGCAAAATTAGAACAAATAATAAG
ATGTCTTGGCCGGGCGCGGTGGCTCATGACTGTAATCCCAGCACTTTGGGAGGCCAAGCTGGGTGG
ATCACCTGAGACTGGGAGTTCGAGAGCAGCCTGACTAACGTGGAGAAACCCCATCTCTACTAAAA
ATACAAAACTAGCCNGGCATGGTGGCGCACGCCTATAATCCCAGCTACTCAGGGAGGCTGAAGCA
GAAAAATCACTTGAACTTGGGAGGCANAAGTTTGTGGTGAGCTGAAATCGTGCCATTTGCGCTCCA

| | |
|---|---|
| Sequence 1101 | cMhvSA010a01a3 |

CCCTTAGCGTGGTCGCGGCCGAGGTACCTGCAAAGGCACTGAGGTGGGAGGGAGCATGCCAATGT
AGGGAAATGAAGAAACCCAGTGTGTATGAGCCAAGCTGAATAAAACATGAGAAGAAGCTGGAGA
ATGAGAGAGACCAGTCCCCAAGCTCTCAAGGAGCAAGAGGAAGCCTTTTCGGCATTTGAAGTGGA
GGGATGGCATGATCTCGTGCGTAGTTTTTA

| | |
|---|---|
| Sequence 1102 | cMhvSA010a04a3 |

CCCTTTCGAGCGGCCGCCCGGGCAGGTACGCGGGTCTTTTAACTGTTATGGATGTATAAGCACTAT
CTATGATGGACGAGGCATAGTGCATCTCCTAGGCCGGAAATGTTTCACTCACTAATGAGCTGGACA
ATTCTACTCTGTGAATTTAACTTTCCTGACTCCCATATGCAGGTTAATTTTGGTAACATATCATATT
TTACTCTGGCTTGGTGGGATTAGGTGGGAAATTACAGATTGCATCAACAATTTGGTCTGCCTGGAT
ACAATTTGGTCTGTTTCAATCACAGCCTGGGTCACACCTGTTGATATATATTTTTAAACTGATTCCT
CTCTAGATCATTCTTTCTGATCAGCACAAGGCAATATGCTGAAATTTCTCTTTTATATCTGTTTTATT
A

| | |
|---|---|
| Sequence 1103 | cMhvSA010a10a3 |

ACGCGGGGAGGCTGTAGGTGGGCTCCGCTGGGTAAAAGTTGCCGCAGCAGCTGTCCCTTGGCCCC
ATCGCGATTTATTTTTCCCCCTTGCTTTCCGGGTCCCGGGATCCCAAGTTTGTAACTAACGGGAGCG
AATCCACACCCGAGCAAAATGTTTGCGAGTTTCAGGCGCCCTTAGTTGAAAGGTTGTAATTAACAA
GTCCGCTGTTTGCCAGCCAGGCGCCGTTGCAGGCGCTTTCTGTGGATTGTCATTTATTTCTTACAAG
CACCCTAGGAGGCTGTTATCCTTGACATCTGCAGCAGCCCTTCCAAGCTGTGGAGACCAGGTCATC
TGGAATGCCCATTTATGTCAATGGAAGAAAGAAAAAGGGG

| | |
|---|---|
| Sequence 1104 | cMhvSA010a12a3 |

CCCTTTCGAGCGGCCGCCCGGGCAGGTACAGCTGCTTGGCCAGGGTCCCTGGCTCTGCCTACGTCA
TCTGGGTGTGTAGCTATAATAACAAAAATGGCAAAAAGGATATTAAGTGGCCATACCTTTCTATCA
AGGAAAGCTACCCNCTGNCACAGACTCATGATACCTTTAGGATTGAAGATTCGCACATCCTGGATT
TAGCCTGTGTGCCATCAATGTTCTGTTTATTGGAAGGAAAGAAATTGATTTCCTGTTTCCTTAGTTC
ATTCATCTATTAATAAACATTTTTTAGGCACCCTACAGGTCCCAGATACTATGCTATGCAGGCAGC
AAAAACACAAATAANACATAATCCCTGCACTGAGGGTCTACTGGGGTAGTGTAGCAGGGGTGGTA
GGCAA

| | |
|---|---|
| Sequence 1105 | cMhvSA010f11a3 |

CCCTTAGCGTGGTCGCGGCCGAGGTACAGGTAGGGTTCATTTGCATTCCTGCAGGTATCCCAGAGG
GAGGGTTCTGGAGGAACTTTGAGCTGTCTAGATTACCCGATGAAAACTTGTTCTTTTATCAACGGC
CACTTCCGGAGCTCGCGCAGGGGCCGCTCACTAGACCACTGCTCCCTGCCCGTGTGCCCCAGTTCA
GAGTAATCTGTATTCTTCACAGTCCCTTCTTCCAGTGAAAGCATCTCTTTTACCTTTCACCAAGCCT
TACCTCTAAAAGGCCAGTGATACCTTAGACATTTCAGAAAGCTCAAAATGATGACTCAAAACTATA
ATAAGCAACGTGCCTGTCCCTTTACTTTTGTTCCCCTGGGAGTTATCAATTGGTCGTCTTGAAATG

| | |
|---|---|
| Sequence 1106 | cMhvSA010g02a3 |

CCCTTAGCGTGGTCGCGGCCGAGGTACTGATATAGGCTGACCTAGAGGAATGTATTTTATGAGGCC
ATTTGTTTTTTGTTATGATGCTTTCAATCCCTTTTACAANTAACTTTTTAAAGTTTCCCCTGAAACAA
GATGAGGGGACCCATTTCTCTTAAGGAGCACAGCACACTGAAAGGCTGTCAGTGGCCAGACGACC
CAGCCACACAGAAAGGCACCCACAGCAGCTGCTTTGTCTTAAAGGGAAAAATACTGGCAGATCCA
GGAGCTGAGAAAAATATCAAACGAGGAAGTATGACTGCCATTTATATCTTCCCCATGACTATGTGA
CTAGGATACTCAGCATTTTTCCTACCAAGGTAATGGCAATGGGGCAGGAGTAAGGTCACAGGGAA
GCTAAAGAGGGA

| | |
|---|---|
| Sequence 1107 | cMhvSA018a11a3 |

CCCTTNCGAGCGGCCGCCCGGGCAGGTACTTTCTTAAAATTAATAAAAACTTATCAGTAAACAATT
TCTATTCCATCAGAAAGTGAGAAAGCTNAAAGATAAATCAGTAAAATGATACTAGAAAAACAATT
ATGGCTCTCTGTGGTTCCCCGATGAGACTTACAATAATAGTGCTTTAGGATTTAGCATTAAAATTA
GATATATTAGTGTTTTATTCATCTCTAAGACAGAATAGTTAGTAATACTTATTCTGCCTTCTACACA
ATATGGTGGTGATAAAATTAAATCATGAATAAGAAAATAAGACAACTTTTATCAACTATAGATTTA
TAAACAGTGACAGCAATCCTAAATGATAAGCCATTCTGGCCATAACTCTGTATTTTACTCCTTCTTT
TGGAAGACTGAAA

| | |
|---|---|
| Sequence 1108 | cMhvSA018b03a3 |

CCCTTAGCGTGGTCGCGGCCGAGGTACACTGGAGGTAGGGAGCTCAGGGATGGCAGCTCAGATCC
GGAACAATTACAATTCAATACTTGGGCATCAGCACTCTAAATCCCGAGGAGCTAGCCAGGAGTGA
AGTGAGGAAAGAGCAAATCAATTTAAACATTGCTAAATACCAAAGACAAGCTAGCTATTTCTTAC
TTTGCATGAGGCTTGCCCACGTCCTTTCTTGTAAATTGTCTGGACCATCTCTGGTCATTTGGTGGCA
TCAGCAGGACAGAGATATAGTGAGATGCAGAGAGCCATCGAAGTTGTCTGACTTGGTGGAAACAA
ATGTGACTTGGCTTGGAGTGTCAAAGCAAGAATGAGTGCGTGCATCAGATGGAAGTTGTCCATGG
GGTCTTGCAGACATGCATCGTTG

| | |
|---|---|
| Sequence 1109 | cMhvSA018c05a3 |

ACACTGTTCTATATTTTAGCAGGGAAGGAATTTGTGTATGTGTGTGCTAACTAGAAACAATGAGAA
ATAGCTCTAATGAAAGTTATATGGTCAGAATTTGGCTACAAGCTCTGCATCATTAGTAAAGCGGAG
TATTATTGGCAGATGTCATGCTACTTTCCAAAAAGCCTGAACCCATCCTGATTTCTCCTTTCTTAGT
TGAAATGCCAACAATTGCATATTTGCTTAATTATTGCTTTTTAAAATATTGGCTCTGTATAAGCAAG
GGAAAGTAATAGAAAAAGTATTGTTCTTCCAAGTAAAGCAGAACACACCAAGTGGACAATAGCAG
CTTATATTTTCACTCAACATGGGATACTATTTTTAATAAGGATGTTTT

| | |
|---|---|
| Sequence 1110 | cMhvSA018f04a3 |

CCCTTTCGAGCGGCCGCCCGGGCAGGTACTGAACTGGGAGGTTTTTAGTCTGATAGCCACAATTTT
GACCTAGGCAGGAAGCTTTACAGCTTGAGGCAGTTTCATGGTCTGAAGACAAACTTCTTGTGACTT
GCTGCCGGTGTTGGACTGCAGGAGAGAGCCTCACTGGGTCAGGAGCACGAGAACAAAGTGGATCC
CACTACCACATCCCACCCCTCCTGTTTCAGAGGCAGATCATGGGACCAGGACTACTGAGAGTTCCA
TGGCCCTACCCATCATCTGAAATGCCCAAGAACTTCTCCGATTAACAAAGGTCAAGCATAAACTCT
ATTGCCACCACCACAGCTGGTTCTCACTTTTAGGTGCTACCTCCTGTCCTAAAGGTTGATCTACACA
GTCCCT

| | |
|---|---|
| Sequence 1111 | cMhvSA018h12a3 |

ACTGGCAGCAACCACCACTGGATGAAGGTGCTTATTGCATCTCATTCTTTGGATCTCATTTTTACCC
ATAGGCCTCTGGGGCACCATATTAAAATTCCAGAGGCCATTCCTGGCCTTGTTTCATACCTTATGG
GAAATGACGCAGGTTATATGGTATGGATCTATAGGTGTAAAGACTGGGTAGCAATGGCTGGATTG
GCCGTACC

| | |
|---|---|
| Sequence 1112 | cMhvSA031b12a4 |

CCCTTAGCGTGGTCGCGGCCGAGGTACAACGTTAGCAGCAATTCAAAAGGGCATCGGAGACAACT
AATCATTTCATAATGAGCGAGGGGAGAAGCAATAAAAGCCGGGAGCCCAAGGACGGCATGATAA
TTTTGCAGAGTCTCAGCTCTCAACCAGACTCACGTTCATAAAATAAACAAATGTTTTTGGTAATGG
AAAGCTAATGTATACATTATTTAAGGATAGTATTAAAACCAGACTAGATGGATCAAGTAATACAA
CAGTTACCTCATTAAGCATCCTTTCTTTGGGGATGTGAAAAAGTTATTCTTTTTTTTCTTCTTCTTTT
TTCCTTTTGAAATGGGGCTTTATTAATTAGAGATGTAATGGGAAATCTTATTTTTTCCCCAGACTAG
TGGCTGTTTTCTGTTTATTTTTTAATGGA

| | |
|---|---|
| Sequence 1113 | cMhvSA031c02a4 |

CCCTTAGCGTGGTCGCGGCCGAGGTACAATAATGGCTCATTGCAGCCTCAACCTCCAGGGTTCAAT
CAATCCTCCCACCTCAGTCTCCCAAGTAGTCAGGACTACAGACATACAGCACCACGGCCAGCTAA
GTAGAGACAGGGTTTCACCATGTTGCCCACGCTGGTCTCAAATTCCTATGCTCAAACGATCCGCCT
GCCTTGGCCTCCCAAAGTGCTGGGATTACAAGCATGAGCCATCATGCCCAGCTCGTAAAGATCTTA
AGTCATATAACACCCTCACTCAGCTTCCAACTGGTGATAGCTATATCATTACATACAGAATATTTG
AGTAGATGGTTACTAGGACAGCAAGATGTAAGTTGCTTTGGTTCAAATAGTGGTTTACTAGAGTTT
AATCTCAAGTGTTGGTTCTGTTT

| | |
|---|---|
| Sequence 1114 | cMhvSA031d01a4 |

CCCTTAGCGTGGTCGCGGCCGANGTACACTCTCTGCCTTANAACTACCATCCTTTGCACTACATTCC
AGATAAAGGATTTTGTTACTACATTCTAGGTAAAGGATATTGATACTATCCTCAAGTTACACAGAA
AACACTCAAGGATGTAAAATCAATATTTATCTCAAATTTGTTGACTGCTACTGCTATNTTTTTTGAA
GAATTAAAAGATAAATTAAAATTTCTAAAAATATGCCATATATCAATAATTTACAATAGCTTGATC
AGCCAAAAAATCCACCTTGAGCTTAAAGCTAGAGTTTGATAGGGGTGATCCTTACTCTCCTAATTT
AAATATCACTGTATATTAGTTTTACAATATACAGTGTATATTGTGTATATTGTGTATACAATATACA
GTGTATATTCTTTTTCCAAA

| | |
|---|---|
| Sequence 1115 | cMhvSA031g06a4 |

ACGAAGTGTGTTTCAGAGTGGCGAGGAAGGGCAAGTTGTTAAGATTGGTTGTTGAATTAGTTTCTG
TTTGATGTTAAAGAGAACATAGAGTAAATGATAATCCCTCGAAAGTGGAGATCTTGGCAGGCTGG
CGCCTGGTGGTATAGTAGAAATCTGAGAAAGGGGGAGGATATTAAGTCAGTTTTATCAGGTAAAG
TTGAATGAAATAATCAAGTTTAAGTGCGTCTTGGGTATTTGCAAAGATGTATAGATTAAGGCTAAA
AGGGTTGGAGAAATAGATTTGGGAGTTACCTATGATTTTTTTTGGTTATTCTGCTCTCAGGATTGAA
AACTAAAGAATCTCAGAACTGCATTTCTAATTAGTGCCATAAAATTCTTTATTGAT

| | |
|---|---|
| Sequence 1116 | cMhvSA031h12a4 |

GGTACGCGGGGACATTCAGAGGTGAGCCCAGAGGGGGTAAAGTGGACTGGGGAGAACTTCGGAG
GATGTTCATGTCCAGGAGCAGCCCCACGCCCTGTATGGTCGGTGTCTAGAGCCTCACAGCAACTAA
GACCAACCCAGCTCTCAGAAGAAGGAATGTCAAAATGTCATGTTCAATTTTACATTCAGTGCCTGG
AATCTTTTCTTCACAATTGAAATGAAATGTGCTGAAGGAGGTGAATCCATGCATTAATCTTCAGCT
CACAAAGGAAATACTACATAAGAAGCAAGACCACAGACTCAAGACGGACATAATTGGATTTTTTT
GCCATGGCCTGGAAAGAAAGGT

| | |
|---|---|
| Sequence 1117 | cMhvSA032b12a3 |

ACCTGCCTTGTTCATATCCAACTAATTTTTTTTGGCTAATTAAGTAATAATAATCAAAACACTTAAG
GTTTTAAAGGATGAATGACCAGTTGAGAGTTACTTCTTATTTGCTCCTAAATCCAATATATTTCCTG
ATCAGTCAATAACACTTAGAACATCTAGTTATAATTGGTAATACAATTGTTTAAAAAATGATAATT
AAAAGGACTAAGACTATATATGGTCTTTTGAGGGGATAACAATTGAATTATTTAAACAAAGTATAT
TAGGATAATAAAACACGAGAAGTCAGTCCAGTGGTTCAATCCATTATTCAGAATTTCATTCTGTTT
ATAATTAAGCAACAGTGACCTTCAGGTTAGTCTTCCTTAGCTGTTAACAACCAGCTGGAGAAGCTG
AGGGCTATTTTTGCAATTATAATCTGTGAAAGATTGAAAAACCGTTAAGATAAATAACGTGTCCAC
CTTATTAACAGGCACTCATTTNCACACTTTGAATACATATCAATANGGGTTNCAAGTTCAATTTNCT
TACCGAACTTTTTTTAACTCTTTTAANAAANCCCCTGTAGGGANGNGGNGCCTCACTGGACTCTTTT
NTGGGCATTGCAATCTAATTTCAAAAGCT

| | |
|---|---|
| Sequence 1118 | cMhvSA032d09a3 |

ACTCTGTTTCAGGCCCTCACTGGGTGCCGGAGATCCACTAGAATACAAGATCTGTTTCTGTGTCTTT
GAGGGACATGTATCCAGCAATTAGTTACATCAGTCCCTTGTAGATGTCAATTCCAGTGTCACAAAT
TTCTTGTTTTGCAACGTTGAGCAAGTTTTTTTCAATGTTTCTAAGCCTCAGTTTTTTGCCCTACAAAA
TGTGGTAATAATATTTAACCATTAGTAATGTTGTGAAAATTAAGCAAAAATACATGTAATATATTT
AACAATGCTTGGTGTTCGTTAATGCTTTAATATATGCTAACTACTTATATTATTGTTGTTGTTGTGTT
AAACATGCATAAGACAGCAGGTACC

| | |
|---|---|
| Sequence 1119 | cMhvSA032d12a3 |

NGAGCGCCGCCCGGNCAGGTACCTCTATCTTGCTCCACCATTGCTGCCTCTGATTTTTCCCTATCAA
AACAATTATGAGGTCTTTTCCGCAGACTGTGTTAGCAGTTTTTGCATCCTCTGCTCATTCCTCTGNC
TCCTTGTCTTCCTCTCCANCTCANCCCATGCCCTGTCAGTGCCGCCCAGCTCACAATTGCCTGATCC
TTGGTGGGTACC

| | |
|---|---|
| Sequence 1120 | cMhvSA032e01a3 |

CCCTTAGCGTGGTCGCGGCCGAGGTACATCTACAGAGTGGTGGGACTGGGCCAGGCCTTGAACCC
AGTGGTCTGATTCAGAGCCCATGCTCTTATTAGTGTTTCCCACAAATGGGTAGTGAAGTAAATTTC
TGATAAAATGAAAAGTTCTCTTTGTATACTGATATCCATTACAAAACCTGCAGGACTACAGCACTT
CACAAAATGCATCATTTCCACAAACAGTGATGTTCTTTTTCAGGGTAAACTATATTGCAATAACAG
CAAATATGAAAAGATACTAATATAGTATCTCACATGCCC

| | |
|---|---|
| Sequence 1121 | cMhvSA032e07a3 |

GGTACCCAGAGAGCCAGAAGGCTGTTGGTGAGATGGAGCAGTCACTGAGCGGGTCACCAGGAGA
ACTTACTTTATGAGATCTGCTGCTAATTTCTGACTTTGGGCAAGTCACCTCACCAGTCTGGGGCTAA
GATTCACTCCTCATCAGTAAAATGAATACTTTGGATGAGACGGGAGGTTTTCCCATTCTGATGCTA
GGATCTTGTTCATGAGTTAATGAAGACAGTTGAGGAAGGTAAGGAGCTATTTCTACTTGATTAGTG
AGGCTTCAGTCTATTTCAACATTTCAAAGTTTTTCATGATAATTTGTTCATGAAAAAAAAAGAAAA
CAGAGGAGTTGCTCCAGCTCTAAAAAAATTTGAAAACCACACCCTGTGCTAATTGCAAGTCTA

| | |
|---|---|
| Sequence 1122 | cMhvSA032f02a3 |

CCCTTAGCGTGGTCGCGGCCGAGGTGCAGCTGTTGTCCATGTGTAGAGCTTTTAATAACCAGCGCA
GCAGGCCCCTTCACCTGCTTTTATGCCTGGACCAGATGACTGAATGTAGAACTTTAGGCACTTTTTT
TTTTTTGAAACGGANTNTCGGTTTGTTGCCCAGGCTGGANTGCANNGGCCCAATNTCGGNTNANTG
NAAGCTNTGCCCCCCGGGTTNACCCCNTTNTTTTGCCTNANCCTCCCAAGTAGCTGGGANTACAAA
CTCCCACCACCNTGCCCGGCTAATTTTTATNTTTTTTANTAAAAACAGGGTTTNACCGNNTTACCCA
GGANGGTNTAAATNTCCTGACCNGGGGATCCNCCTGCCTTGGCCTCCCAAAGNGCTGGGATTACA
GGNGNNANCCACCAAATNGGCCNTTTAGGCCCTTTTTANTTTTAAAGGNNAAAAAACATCCTTTAA
AAAGTTAATTCC

| | |
|---|---|
| Sequence 1123 | cMhvSA033b03a3 |

CCCTTTCGAGCGGCCGCCCGGGCAGGTACTCAAGCTTTGGCTTTTCTGAACTTTCCTTATTTTCAAA
AATGTCCCCCAGCCCCACTTCCACCTGAGACATTCACACACCCCATTTCCTCTTCCAGGAAGGCTCT
TATGTCGCCTGGGTAAACTTACTCTTCAAGTCTAGTGACTTTTTTCCAGAAGCTTTCCTGATATCTT
TCCATTTCACCCCACTGCTGACTTATTAAAATTTCTAGAATTTTATACTTTTACACTACATTCTCTGT
GTTGTATTCTCTTATTCAGGGTCTGCTATTTAATTTTTAAGTTCCTTGAAAATAGAGACAATTTCAT
TGTTTTCATCAGTTTGGTCCAAGTATATATAACATAGATGAAAAATAGATATTTTGTATTAT

| | |
|---|---|
| Sequence 1124 | cMhvSA033c07a3 |

CCCTTAGCGTGGTCGCGGCCGAGGTACTTTTTGCATTTTCAAATGACTTTGACTATTGCCAGAGTCA
TTATAGACCTGCCTATGATGTAGGAGTTTATTGTATCTAGTGGAAAACATACCTGTTTGTGGGGCA
GAAGCTTCTGTTCCATTCATCCTGATTTTAGACACAGCATTTAACTTTTCAGGTTCAGTTCCATATG
TATAAAGTAGGGATAATAGTGACATCCTAGTGTATTAAGAATTAAGGTGTNATTATTTCTGTCACT
GNTACTTCACCCTAATTT

| | |
|---|---|
| Sequence 1125 | cMhvSA033c12a3 |

CCCTTTCGAGCGGCCGCCCGGGCAGGTACCACCATGCCTAGCTAATTTTTTGTATTTTTAGTAGAG
ACAGGGTTTCAGCATGTTGGCCAAGCTGGTCTCAAACTCCTGGCCTCCTGTAATCTGCCCGCCTGA
GCCTCCCAAAATGCTGGGACTATAGGAGTGAGCCACTGCGCCCAGCCTTCAAATTCATTCTTTTAC
TTCTGTAATCCTAGTTGTTTAAGAAATTTTGCAAATTCAATTAATTTTCTTTTCCCTTTCCCTCTCTC
ACTGATTTGTCACTTTCTCAATAAAGAATTCAAGGTTTGAAAAATTATTGTGGCGGCAGTATTCAA
AAAACTTTCCTTCACTAAACACACACTTAACTGTGTTCCACTACTGCTGTTGTCTATACTTTAAGGG
AA

| | |
|---|---|
| Sequence 1126 | cMhvSA033e05a3 |

CCCTTAGCGTGGTCGCGGCCGAGGTACAGGTAAGGGGGAAGTTCCAAAGCTGTTAGTCACCTTGTT
TTCATGCTGATCACCCAACCAGATCTAATGTTTGATGTTCTAAGAACTTTAATGTTTTGGAGGAAAT
ATCTTGTGGCCTTCAAAAAATCATTCTGTGAAATAGTTGTTTCTACCTACATTCGTCTCATTAATTT
TTCTACATACAGCAGAATTCTGCATATATTAGAGGTAACTCAGTCAGGGTGTCATGGAGGAAGGTG
GCCCATGGTTCACCATCTTGCCAATAGAAAAACCAATAGGAAGTCATCTAACCATCATTCGGAGG
GATTGAGGTCTGTCATAGGGAGAACAAACTAAAGAACTGGACTTTGCTTTCAGTCAAGATGGAGT
AACAGGG

| | |
|---|---|
| Sequence 1127 | cMhvSA033f06a3 |

CCCTTAGCGTGGTCGCGGCCGAGGTACCAGGTTCAAATAGTCAGCAGCTCATCATAATCAATGAGC
GAGGACATAAAGTAGGAAAAATGCATCACCATGGTGAGCAAGGAAGGCAAGTTATTGGAGGCAC
ATGTTAACACATAAAATATAAAATTAATATGATCACACTGGAAAGGCTTGCCTGAGCCCACAGTTT
GAATGCCTACAATAAGATGAGATGCACAACAAAAAGCAAGAGAACCTGATCAAGTGGGTGACCT
GGCCATGGTGCTCTCATCAGTGGGGACCCAAATGCTTATGTGGACTCACCAGGTATCGAATTAGAC
ATGAATAGGAGTGTTTGTTGTGATGGCAAGAAACTATATAATCAAATGAATACAATGAAACTTTA
AAAATAATTGTAAG

| | |
|---|---|
| Sequence 1128 | cMhvSA033f11a3 |

CCCTTTCGAGCGGCCGCCCGGGCAGGTACAGACGGTCAGAAGGAAAGAAGGAGAGGGATTGCCT
GCTGCCTCCCCGCGTGCACACACGAGAGTGGGTGCTCCCACCAGCTTTCAGGGGGCTTTCTTCACG
AATGTGAGCACTGATTTTGGGAGATCTGCAGTGGAAAGTCAAGTCATGAATATTTTTTATAAAGAG
AGAAATGATGTAATTTTATCACAGAAGATATTTCAGATGTATTTTTCCATTTTAAAAATTCATTGGC
AGTGCTCATACAAGAGAATTACTTGACTGAAAATGACTCTGTCCAGTTTCTTCCTATTTCGTTAATG
ATTTTGCAGTCACTGAATTCTTTCTAAAAGTTGTATAACCCAGATAAAGTCAGGCCTCCTGGAAGC
CAGCTTCAG

| | |
|---|---|
| Sequence 1129 | cMhvSA033h06a3 |

GGTACAGGAGGCAGCTTTTTTCTGCTCTCTGTTGACTTCTGAAGCCAGCCTCATGATCGTTTCTCTG
CTAGCTTTTGCTTCCATCTCATGGACATNTATAGTCTCTTCAANAATAACAATTTGTCCTTTCACGA
ATTCATTTTCTTTGCGCAGGTCTCTAAGCTGAAGAGAAAGCAATTACAGCTGTCCTATAAAAATTA
ACAATTNCATCATTTTCTCTAAGCAAGTCACATCTATAGACTGCATTATCATATGAAAAATGTAAG
AGCACTATCCCTACATGGACTGGAAAGGTCACATTTTCAAAGGCAGCCTGTAAACTCTGNGNTTAG
ACCTGGGGGNCAAATTCAAAT

| | |
|---|---|
| Sequence 1130 | cMhvSA037a05a3 |

CCCTTTCGAGCGGCCGCCCGGGCAGGTACTTTGCTACACGGCCGGGGGCCATTGAGACTGCCATGG
AAGACTTGAAAGGTCACGTAGCTGAGACTTCTGGAGAGACCATTCAAGGCTTCTGGCTCTTGACAA
AGATAGACCACTGGAACAATGAGAAGGAGAGAATTCTACTGGTCACAGACAAGACTCTCTTGATC
TGCAAATACGACTTCATCATGCTGAGTTGTGTGCAGCTGCAGCGGATTCCTCTGAGCGCTGTCTAT
CGCATCTGCCTGGGCAAGTTCACCTTCCCTGGGATGTCCCTGGACAAGAGACAAGGAGAAGGCCT
TAGGATCTACTGG

| | |
|---|---|
| Sequence 1131 | cMhvSA037a12a3 |

CCCTTTCGAGCGGCCGCCCGGGCAGGTACCTATTCTCTCAATTTTGAAACGGCAAAAAATTTTTAA
AAATTAAATAACATTCATGCTCTGTTTTGGACTGACATCCCAAGATTTTAGTGTAGGGCAGTAATT
TTCATTTTCAAATTACAATGCACCTTCCATTCCTCAGAGAAAAGTAAGTTTCTTTTTCTACCTCACT
GTCTCCTGGCTCTCAAACCCTCCTAGGCTAGTAAGCGTCTTCAGCCCAGATGAAGAAATAAGAAAA
TCCTATGGAAGGGCTTTCTTGCTTGAGGCTATAGTAACAGCCACAAAACACCCACACACTTTTAAA
ATTCTTACCTCGGGGGTAGGGATAGCATTAGGAGATATACCTAATGTAAATGATGAAGTTAATGG

| | |
|---|---|
| Sequence 1132 | cMhvSA037b03a3 |

CCCTTAGCGTGGTCGCGGCCGAGGTACCAAACTGCTGTCCCCAAATAAAGAACTTACATCAACAA
GGAATATAAAAATGTTATTTAGGACTTCTGTTCTCAGATGTTTAATACAAAGGAGAGATTGTTGTG
CCAGGGAACAAAGTGATCCAATATCCACGAAGCCAGAATTCTCCTACTGCACATTTTGTTTCCAAA
ACACTAAGGAATACAGCAAGATTTCAAGTTGGAGTAAAGAAGCTACTTCTGGAAACAAGAGAGGA
GATAACTGAGGACTTTCACAGAGGGGCTGAAATCCTTCCCGGAAAACTGTG

| | |
|---|---|
| Sequence 1133 | cMhvSA037d03a3 |

CCCTTTCGAGCGGCCGCCCGGGCAGGTACTACCGGACCTGTTTCATCTCTGCTTCCCAAGCCTCAG
GCCTGGGCCTCAGGGATTCTCTCCAGTGCATACCTTAGGCTACAGCTATAGGGCAGCTGTGGTTAG
GGAAGGTCCCTATTTAGAATAGTTGGTCAAAAAGCACATCACTTCTGTCCCTTTCTTGCAGAACTG
GTTGCTGCTCTGGAATGAAAGTTTGATTGGTCTGTTAGCCATGCCCACCTGGATTTGGGAAAGCCA
ATAGAAAGAATCTTCTGCTCTCCTATCTGCTGTTGCTTTTTAACCTGTAGCCTAAAAAATGGCATTA

| | |
|---|---|
| Sequence 1134 | cMhvSA037e10a3 |

GGACACACAGTTAACCACAAAACAGGCCTCTCTGAAAAAGCCATTGCCATGGACTGCCAGACAGA
CAATGACAAGACACAAATACCTTCTGGTGTGTGAGCCACGGGACATGTGAGCTTCCCCGCTGATGC
TCCTCTTATATCAAAGATCACTTTTACAAGATGAGCGACTCAATATCTTTTATCAAACCAATGATCA
CCTGCAAGCTATGGTATATTTTTGCAGCTGTGTAGAGCTATGTGGCATGAGAATGTGGGACTTATA
AATTGCTGATCCAATAAATAGACATTATGGGCAACAGTGTCTTATCAGCTAGTGTGTACCTGCCCG

| | |
|---|---|
| Sequence 1135 | cMhvSA037e12a3 |

CCCTTTCGAGCGGCCGCCCGGGCAGGTACTTTTCTTTATGAATGTTATACCAGAACTTAGGAGGAA
AAAATTTTTGAGCATACTGAATATTAGGAATTGGATATCTCCCTAAATTATTAAAGTTCATCTTCCA
TAAATTCTGTAAAACTGAATGTAGTATTTCCCCCTCTTCCCATGCAAGTAACTGATATCACTTTAGA
AAACCTGATATGAACATTATTTGTTATTGTGCTTTTATGAAGAATTCTGTCTAATCTTCTCATAAGA
AGAAAGAATTAGAACCAAAAATCTAATTATCAGATTTAGTAAGATGTAGGCAAGATCCCCTATTTT
TTTCATTTATGTCTTTCAAAATC

| | |
|---|---|
| Sequence 1136 | cMhvSA037g04a3 |

CCCTTAGCGTGGTCGCGGCCGAGGTACGCAACATGACATTGGCTGGTGTAAAGATCTTACAATTAT
TTTTAAAATTTCATTGTATTCATTTGATTATATAGTTTCTTGCCATCACAACAAACACTCCTATTCAT
GTCTAATTCGATACCTGGTGAGTCCACATAAGCATTTGGGTCCCCACTGATGAGAGCACCATGGCC
AGGTCACCCACTTGATCAGGTTCTCTTGCTTTTTGTTGTGCATCTCATCTTATTGTAGGCATTCAAA
CTGTGGGCTCAGGCAAGCCTTTCCAGTGTGATCATATTAATTTTATATTTTATGTGTTAACATGTGC
CTCCAATAACTTGCTTTCCTTGCTCACCATGGTGATGCATTTTTC

| | |
|---|---|
| Sequence 1137 | cMhvSA041a04a3 |

ACGGGGAGCCCCTTTTTCCTCTTCTCCAGGGTCTTAATAGGGTCTGGAAAGACTCACCTGGTCCAA
AAAGTTTGAGGAAGAAGCTTCTAGTCTTCAGCTCTGTAGGGTCAACATGAGATGCTTATTGTTCAA
GCCTGTGTGATCCACCCAAAAGTAGGCTGCTCTACTACGGCATCCATGCTGCTGTGACCGGATGGA
CCACAGGACAGTTGAGACCCCAGCTAGATATCTGCCAAACCCAGGACTGTCAGCAAGGGAATAGG
GTTCAGGTCTTCTCCATTTATAAACTACCAACCCCTCTTTACTCTGGAATATTCTCACTCTCCTGGCT
GGGATAGACAGTGTTGGCTCATTCCACTCCC

| | |
|---|---|
| Sequence 1138 | cMhvSA041a07a3 |

CCCTTTCGAGCGGCCGCCCGGGCAGGTACGCGGGGAAACAGGCTACTGCTATTAAGGATTGCACA
ACTTCTGGGCAAGGCAGAGGTGGGTTTGGCTTTTTAAAAATTTTTTCAGCCTGTCCTCATGGAACT
ACATATTCTTTTCTAAGAACTTTTCATCCTAACCTCCCTACTCACATCTTCTAAGTGTCTCTGCTCTG
GTGGGAATGTGATGGACAACACAGAGCCATCTCAGAAGCCTCTGTGGCCACCACCAGGCCGGCCA
GGGTGCAGGGGGCCACTCCCTGGGCAGCCATAGGGTTCTCAGCAAGGTGCATTCGTCGTCCCTGCT
GAGAATCTGATGGGGCAGCATTTTTTTTTAATTAAATGCAAGCTGAGTCATTTCAAC

| | |
|---|---|
| Sequence 1139 | cMhvSA041b03a3 |

NNCCCTTAGCGTGGTCGCGGCCGAGGTACAACGNTAGCAGCAATTCAAAAGGGCATCGGAGACAA
CTAATCATTTCATAATGAGCGAGGGGAGAAGCAATAAAAGCCGGGAGCCCAAGGACGGCATGAT
AATTTTGCAGAGTCTCAGCTCTCAACCAGACTCACGTTCATAAAATAAACAAATGTTTTTGGTAAT
GGAAAGCTAATGTATACATTATTTAAGGATAGTATTAAAACCAGACTAGATGGATCAAGTAATAC
AACAGTTACCTCATTAAGCATCCTTTCTTTGGGGATGTGAAAAAGTTATTCTTTTTTTTCTTCTTCTT
TTTTCCTTTTGAAATGGGGCTTTATTAATTAGAGATGTAATGGGAAATCTTATTTTTT

| | |
|---|---|
| Sequence 1140 | cMhvSA041b07a3 |

CCCTTTCGAGCGGCCGCCCGGGCAGGTACATGGCTAAAATCATTATACTTTCCCCGTCTTATGATA
ATCTCAGCAAAACACAAGCACGGATTCTTTCCTAGTCTTCCTGCCCATCCACCGCCCGCCATTTTCC
CTGGACCCCGTGTGATGACAGTGAGGCCTCCTTATTCCTTGTCCAGCAGGGATTGTGGTATGAGTG
TGTTCAGGGACAGTTATGAGTGGAAGTTGGGGAGAGACGTGGAAGGGCGGTTTTGTGTGGCGTCT
GTGCCATTACAGCCTCAGCTACAGAGACTGCACTTGCGGGCAGCTGCAGTGCTGGAAGCAGATGG
GGCCCTGTGCGAGGGGTCAGTGGAAGGCAGTGACTTTGAGAGCTCTGATGGTAGTTGT

| | |
|---|---|
| Sequence 1141 | cMhvSA041c04a3 |

CCCTTAGCGTGGTCGCGGCCGAGGTACTTCTATACAGTGGAATGCTACTCAGCAATGAAAAAGAA
AAAGATGCAACAACCTGGATAGACCTCAAAGGCATTATGTATAGTAAAAAGGTCAACCTTAAAAG
GTTATATATTATATGATTGCATTTATATAACATTCTCAAAATAAAAAAAACTATAGAGGATGAAGA
ATAGACTAGTGATTTCCAGGGCACAGGGACAGGGTAGGAAAGAATTGGTAGACAATGTGAATGCA
AAGAGGTCTCCTGTGTTGATGGAACAGTCTGTATCTTGATTGTGGTAGTGGCTACTCAAATCTATG
TATGGAATAAATTAAATAAAATTATACATATACACACAAATAACTGCAGGTTTAAAAT

| | |
|---|---|
| Sequence 1142 | cMhvSA041c06a3 |

CCCTTTCGAGCGGCCGCCCGGGCAGGTACAGTGGCCTAGATGGCTTTAGACTTCAGGATTCTTTAC
CATCTAGCCCCTTTTACTCTACCAACTTATTTTGTTACTTGTTGACATAATCTGTAGCCAGGAAAGC
CTGCATACAGTTTGTTATCCCTCTGTCTTTGCTCATGCGTTTTCTGCATCTGGAATCATCTTCCTCTC
TTCTCTCTGCTGGTTCATGTCCCTATTTTCTTTCAAAACTCTCTTTGAAATTTACATTTTTCAGGAAG
CCTTTCTCTTTGGCTTGCTGGACATCTGACCGGCATGTTATCTTTTCATATTTGTTCAAAATGTCATT
TTCAACATTTACTCAACTAATTAATATCAAGGACTTGCCATCAATTCTCTT

| | |
|---|---|
| Sequence 1143 | cMhvSA041c09a3 |

CCCTTAGCGTGGTCGCGGCCGAGGTACAGCTGTTGTCCATGTGTAGAGCTTTTAATAACCAGCGCA
GCAGGCCCCTTCACCTGCTTTTATGCCTGGACCAGATGACTGAATGTAGAACTTTAGGCACTTTTTT

| | |
|---|---|
| Sequence 1144 | cMhvSA041d09a3 |

GCCGCCCGGGCAGGTACACTGTTCTATATTTTAGCAGGGAAGGAATTTGTGTATGTGTGTGCTAAC
TANAAACAATGAGAAATAGCTCTAATGAAAGTTATATGGTCAGAATTTGGCTACAAGCTCTGCATC
ATTAGTAAAGCGGAGTATTATTGGCAGATGTCATGCTACTTTCCAAAAAGCCTGAACCCATCCTGA
TTTCTCCTTTCTTAGTTGAAATGCCAACAATTGCATATTTGCTTAATTATTGCTTTTTAAAATATTGG
CTCTGTATAAGCAAGGGAAAGTAATANAAAAAGTATTGTTCTTCCAAGTAAAGCAGAACACACCA
AGTGGACAATAGCAGCTTATATTTTCACTCAACATGGGATACTATTTTTA

| | |
|---|---|
| Sequence 1145 | cMhvSA041d11a3 |

CCCTTTCGAGCGGCCGCCCGGGCAGGTACACAGCATGCAGGCTGCAGCCTGGGCCCCTGCCAGGC
AAGATGTAGGGTGTGAGGTTGTGCTCTGCCCCATTCACTCTGGAACAGCTCCGCCCTTGAGTCCAG
GATATTTTCTCAGTGCCTCCACGCATTTGACCATCCAGAAAACATCCCAACTCAGTGTGCCTCGGC
CACCATAAATCAGCCAACCACACATGCTGCCCTCAATGCTTCTGAATATCAAGGGAAAGGATCTGC
CTCATCCTGCCCTGCTCCTGAGGCTTGCGCATTGACGCTTGAGTTATGTCATTATTTTTTTAAGTGA
TAGAAATCTAGTCAATGATTTGTAGCAATCACCACTGTGCAACGTATGCCAAAAAACTCTGT

| | |
|---|---|
| Sequence 1146 | cMhvSA041e02a3 |

CCCTTANCGTGGTCGCGGCCGAGGTACACCTCCCAATGTGGAGCCTGGAACCCTGGGAAGGGCAG
GCGGGCAGAGCCTCCTCACAGGGACTGGAGTCTTGGGAGGTTTACCCTATAGGAAGAGAGCAGTG
ATTCGTGTTGCTCAGGATTCCTTANATTCCTTTGGGAGAGTTAATCATCTTTACTACCCAGAGTGCA
CCCTTAGGTCTAGGTTGTCATACCCANTGATTGATATCTTANGGTAAAAGACGACCTGAGAATGGT
CTGGCCATGATCATAAAGATCGGATTGCTATGATCATGATCAGTCAGGGCTTTGGTGTTTTATTCTA
ATTG

| | |
|---|---|
| Sequence 1147 | cMhvSA041e05a3 |

CCCTTTCGAGCGGCCGCCCGGGCAGGTACGCGGGGACATTCAGAGGTGAGCCCAGAGCGGGTAAA
GTGGACTGGGGAGAACTTCGGAGGATGTTCATGTCCAGGAGCAGCCCCACGCCCTGTATGGTCGG
TGTCTAGAGCCTCACAGCAACTAAGACCAACCCAGCTCTCAGAAGAAGGAATGTCAAAATGTCAT
GTTCAATTTTACATTCAGTGCCTGGAATCTTTTCTTCACAATTGAAATGAAATGTGCTGAAGGAGG
TGAATCCATGCATTAATCTTCAGCTCACAAAGGAAATACTACATAAGAAGCAAGACCACAGACTC
AAGACGGACATAATTGGATTTTTTTTGCCATGGCCTGGAAAG

| | |
|---|---|
| Sequence 1148 | cMhvSA054a03a1 |

CCCTTTCGAGCGGCCGCCCGGGCAGGTACAAAAGCTGAGGGAAAAAGTTTCAGCTTCAAGCATTA
ACGTTTTAGTTCATAAATCTGAAGGAAAATAAAGAGAAAATAAAGGCATTAAGAGATATGAAACA
ATGTAAAAATGAATATTTCTTTTANGAATCCTTGTGAATATATGACAGTATACAAGCTACAGAAAA
CTAGTTTACTGGGAGGATCACGAGGTCAGGAGATCTAGACCATCCTGGCTAACACGGCGAAACCC
TCTTCTCTACTAAAAAATACAAAAAATTAGCCAGGAGTGGTGGCGGGC

| | |
|---|---|
| Sequence 1149 | cMhvSA054d12a1 |

NGGGGCCCTTTCGAGCGGCCGCCCGGGCAGGTACAAGGTTGGTAGGAGGAAGAGAAGAAATGAT
TGGCTCCCAGAGGCTTCATGGGCTCCCAATTCATGATTCTTTCTCTGTGGCTAATTTTTGTTAAGTA
TAAGAATTCCAGGAATCTCTTAGGAATNGGGGAGACTGCTTTCTCCTGAAATATAAAACATCTGCT
CTTGGTCTGTTTGGCGCTCCACTGTCTGAGGGGAAAACAGGGAAAAAGAGGTAATATAAAACAGA
CATTGTTTCANACAATAAATCCCCCTTTACTCATTAATGAGAAAATAAATTTAGG

| | |
|---|---|
| Sequence 1150 | cMhvSA054e02a1 |

NNGGGGCCCTTAGCGTGGTCGCGGCCGAGGTACACCAGGCAAAAGACAGTGGGAGCCCTACCTAA
GGTCAAGGCAGAGGGATAGAGAGTAGGAGACAGATTCTAGGTTACAAAGTTACAGCTGCAAAGA
CTGAGTCAGCTAGTTGTGGTCACGGGCAGGAGTAGGAGGAGGAAGGTAGGGGCTAGTCAAGGTCA
GCGTGTTGGGTCCTGCTGCGGTCACTGCCAGGTTCTTCCATGGCTCCGAAGGTGGACCACAGGAGC
TTTCTCCATCCCCAGAAAACCTGTTGTCAGCTCCTCTGAACTCCATCTACTGTGCATGTGGCAC

| | |
|---|---|
| Sequence 1151 | cMhvSA054f04a1 |

AGCGGCCGCCCGGGCAGGTACACACTAGCTGATAAGACACTGTTGCCCATAATGTCTATTTATTGG
ATCAGCAATTTATAAGTCCCACATTCTCATGCCACATAGCTCTACACAGCTGCAAAAATATACCAT
AGCTTGCAGGTGANNATTGGTTTGATAAAAGATATTGAGTCGCTCATCTTGTGAAAGTGATCTTTG
ATATAAGAGGAGCATCAGCGGGGAAGCTCACATGTCCCGTGGCTCACACACCAGAAGGTATTTGT
GTCTTGTCATTGTCTGTCTGGCAGTCCATGGCAATGGCTTT

| | |
|---|---|
| Sequence 1152 | cMhvSA057b02a1 |

CCCTTTCGAGCGGCCGCCCGGGCAGGTACATGACATTTTGCACTCAGTGGTATCCCTAGGACTTGT
TTGAATACATTGCTGTATTTATCTAAAAGGGCAAAGCTTTCATTAAAAATAATCTAGTGGCAATGT
TGCACAGCCCTAATTCTCTACTACATGAAAAGTTATATTTTCAGGCCCAGAGACACAGGATTACAG
GTCAGTGATAGGCAATGCATATTTGAAGTATACCAAAAGCACCAAATAATGTAGCTGAGTATCCA
GAAGGAACTGACATAAAATGCAGGGGTCTAATTACTAGAGTCATTGCCACAGAACCAGTCATCGA
TGACTAAATTATGCACCTGGTTTCCTGGGAAAATCTGCAGTTTGGGGAACATTTCACTACACTTCA
GAGCATTTTAAGTCTTTAAATCATTTAGCTTTTAAAATC

| | |
|---|---|
| Sequence 1153 | cMhvSA057c05a1 |

GCCGCCCGGGCAGGTACCCTAAACAAATATTAATACATAGACTCTGAGTGCATGCTGCTCACCTAT
AAATTCATGCTTGGGTAAAAGAACATGCTTTTACGATAGTCTGAGTCTTAAAGAGAAAGGCATCA
AGTGCAGGTCACCTGGCTTCCCTTCTGCCATAGACACCAGATAAATTCCAAAAAATGCAGGGGAT
GTGGGTCTAGAGCTTTCCTAACTTTGTAATTATCGCAACTGGTTCTGAAAGTTACTATATCCTCAGT
AAAGAATTCAAAGAGACTAAGTCTGCTTCTCCAGGTCTCCAACTCTGAGAACACTTGGAACTCTGA
TGTAGATCTCAACATACTGAAATCCAGTTTTCCTGTCTCTAGCCTTTGACTCAGAAGCACCAC

| | |
|---|---|
| Sequence 1154 | cMhvSA057c12a1 |

CCCTTAGCGTGGTCGCGGCCGAGGTACCTTCTAAATGCCAGGCTCATNTACGGCCATACCACCCTG
GACGTGCCCAATCTCGTCTACGTGCCAGGCTTGGGGGCATATGCAGATACATGGGACAGATCCCTT
GGAGGATACAGACAGATAAGCTCATGGTTCCTGCACAGGGTGGTGTGGGCTCTTACTGCTGAGCT
GAGACCTATGTGGTGACTGTGTTGGACTGAACCCCAGGGAAAGGTGTGGGGTCGGGTGTGATGGG
CACAAACAGAAAAGTGGCTGNTATGATTCACAAACTTATTGCATGTCATTGTACCTGCCCGGGCGG
NCGCTCAAGGG

| | |
|---|---|
| Sequence 1155 | cMhvSA057e10a1 |

CCCTTTCGAGCGGCCGCCCGGGCAGGTACTGGGGCACTCATTCTGCATGCTCCGAGAGATGCACTT
CCAGTTTCCGAAGAAGGGTCCTAGAATGCTTTTTTGCACCCGGCTTTTTACCCTATCATCATTCATT
TTCCTAGGCAGTTTTGTTGTTTCCTTTCTTCTGCAAAGCCGGGTAGATGTCTCTCACAGACAAGCTA
GAAATGCTGAGAGCTTCTGATACTCTGTTTCCTGTGCCTCTGTCTACTGTGCTAAAATAAATACTTC
TAACTTCCTTTTTGGAAACCATAGCAATTATTTCATTGCTTTGAAGACCTTCATACTCCTGGTCCCC
ACCCTGCAACATGGATTCCTGTGGCTGCTTTCTTCCAAATGCTACAGTGCTCAGTGTTGACTTTTTC
AAGATGACTCACATGTAACTTAATG

| | |
|---|---|
| Sequence 1156 | cMhvSA057e11a1 |

CCCTTAGCGTGGTCGCGGCCGAGGTACTTTTTTTTTTTTTTTTTTTTTTNGACACANAGTTTCACTCT
TGTTGCCCAGGCTAGANAGCCATGGTGCAATNTCAGCTCACCACAACCTNTGCCTCCTGGGTTCTA
GCCATTCTCCTGGGAGGCANAGGTTGCAGTGTGCCAAGATCACGCCATTGCAATCCACCCTGGGCG
ACAAGAGCAAAACTCCATNTCATNTNAGAAAAAAAGAAAAAAAAAANGAAAAGAAAAATANATG
AGCATCATAATCAAAAAGGCAGCCCTAAGAATAAATGAAAAGTTCACAGAAAAAAATAAAAATG
CAAATATCCCTTAAACACAGAAAAAGTTTCTAAGCTCATTCTTAAAAGGGAAAATGCAAATAATT
AACTAATTAA

| | |
|---|---|
| Sequence 1157 | cMhvSA057h08a1 |

CCCTTAGCGTGGTCGCGGCCGAGGTACTTTTCTTTATGAATGTTATACCAGAACTTAGGAGGAAAA
AATTTTTGAGCATACTGAATATTAGGAATTGGATATCTCCCTAAATTATTAAAGTTCATCTTCCATA
AATTCTGTAAAACTGAATGTAGTATTTCCCCCTCTTCCCATGCAAGTAACTGATATCACTTTAGAAA
ACCTGATATGAACATTATTTGTTATTGTGCTTTTATGAAGAATTCTGTCTAATCTTCTCATAAGAAG
AAAGAATTAGAACCAAAAATCTAATTATCAGATTTAGTAAGATGTAGGCAAGATCCACCTATTTTT
TCATTTATGTCTTTCAAAATCAATCACATTCTATTATTCACCGATCCACTAAACAGATGTAGAATTC
CTATTATGTAGCAGGCATTGTTCTGTTAAT

| | |
|---|---|
| Sequence 1158 | cMhvSA057h09a1 |

GGTACGCGGGGAGACACATTCAGAGGTGAGCCCAGAGGGGGTAAAGTGGACTGGGGAGAACTTC
NGAGGATGTTCATGTCCAGGAGCAGCCCCACGCCCTGTATGGTCGGTGTCTAGAGCCTCACAGCA
ACTAAGACCAACCCAGCTCTCAGAAGAAGGAATGTCAAAATGTCATGTTCAATTTTACATTCAGTG
CCTGGAATCTTTTCTTCACAATTGAAATGAAATGTGCTGAAGGAGGTGAATCCATGCATTAATCTT
CAGCTCACAAAGGAAATACTACATAAGAAGCAAGACCACAGACTCAAGACGGACATAATTGGATT
TTTTTTGCCATGGCCTGTAAAGAAAGGT

| | |
|---|---|
| Sequence 1159 | cMhvSA058c05a1 |

CCCTTAGCGTGGTCGCGGCCGAGGTACATGTGCACAACGTGCAGGTTTGTTACATATGTATACATG
TGCCGTGTTGGTGTGCTGCACCCATTAACTCATCATTTACATTAGGTATATCTCCTAATGCTATCCC
TACCCCCGAGGTAAGAATTTTAAAAGTGTGCGGGTGTTTTGTGGCTGTTACTATAGCCTCAANCAA
GAAAGCCCTTCCATAGGATTTTCTTATTTCTTCATCTGGGCTGAAGACGCTTACTAGCCTANGAGG
GTTTGAGAGCCAGGAGACAGTGAGGTANAAAAAGAAACTTACTTTTCTCTGAGGAATGGAAGGTG
CATTGTAATTTGAAAATGAAA

| | |
|---|---|
| Sequence 1160 | cMhvSA058d06a1 |

CCCTTTCGAGCGGCCGCCCGGGCAGGTACTTTTTTTTCTTTCTTTCTTTCTTTTTTTTTTTTTGTATTT
TTAGTAGAGACTAGGTTTTACCGTGTTAGCCAGGATGGTCTGGATTTCCTGACCTCGTGATCCGTCC
GCCTCGGCATCCCAAAGTGTTGGGATTACAGGCGTGAGCCACGGAGCCCGGCCATAGGCCTGTTTC
TTATTCTATATTCCTGTTAATGTAAACCTCCTGAGATTGGAAGACAATCANTTTTACAGGGTAAGA
ATTGTTTTAATTATGTGGCAGCTTTTNTNCAAACATGAAGAGAAACATTAGAAATACGTTTAATAA
AATTCTCTATTATNTTGTTTTCTTTCAGTTA

| | |
|---|---|
| Sequence 1161 | cMhvSA058e02a1 |

CCCTTTCGAGCGGCCGCCCGGGCAGGTACGCGGGGGACATTCAGAGGTGAGCCCAGAGGGGGTAA
AGTGGACTGGGGAGAACTTCGGAGGATGTTCATGTCCAGGAGCAGCCCCACGCCCTGTATGGTCG
GTGTCTAGAGCCTCACAGCAACTAAGACCAACCCAGCTCTCAGAAGAAGGAATGTCAAAATGTCA
TGTTCAATTTTACATTCAGTGCCTGGAATCTTTTCTTCACAATTGAAATGAAATGTGCTGAAGGAG
GTGAATCCATGCATTAATCTTCAGCTCACAAAGGAAATACTACATAAGAAGCAAGACCACAGACT
CAAGACGGACATAATTGGATTTTTTTTGCCATGGCCTGNAAAGAAA

| | |
|---|---|
| Sequence 1162 | cMhvSA058e11a1 |

CCCTTTCGAGCGGCCGCCCGGGCAGGTACTCTTCCTTCCAGAGGTTTCCCCATGCCCTCTTTTGGAC
TTGATGGGGGTCATTTGGGACAATAAGGCCTGATAACTCCTTGGACTTAGGAAGCGAGAGAGCAG
GAATCAAGAAAAGCTTTTGTGTTTTTTGGTTTGTGTAGAAAATATGATGGATTGAGATAAAATTTT
TCAAAATAGGCCCAATGAAGAAGAGCAGATTCAAGGAGTAAAGGATTATTTATGAGGATGGCCTG
TGCAAAAAGACACCCAGAGATTTCATGCTGTTGATTCACAGAAAGCCTGTTCCTCTTCACTCCGTA
GAGTCCTCAGAGTCTGGATCATCCCTTACAGAAGATCCTTGATAATATTTCTGATATACCTCCAAG
GTTCCGTTTGTCAA

| | |
|---|---|
| Sequence 1163 | cMhvSA059a08a1 |

ACCTGGCTTCTCTTGGCCAGATCGAAGGACTGTAATATGATTTAAGTTGTGAATATGCCTTAGTAT
GTGAGATGTCTTTTCATATGAGGGAGTTCTTAACCTACTTTAGCTTAATCACCAGATCCTTTTGTCT
TTTATGCTAACACATAAAAAACACAGGCTTGGTATTACAGCTTTTTGTCTTCTATGCATGAGCAGTT
TTGTTTTGTATCCCAGGGATCCCAGAANAACAGNTTTGCTTGGCCAGGGTACC

| | |
|---|---|
| Sequence 1164 | cMhvSA059b06a1 |

CCCTTAGCGTGGTCGCGGCCGAGGTACGCGGGGAATTGCTAATGGGAATGGGGTTTATTTTGAGGT
GATAGAAATATTGNTGAAATTAGAAATTGGCGGTGATTGCTAATGGGAATGGGGTTTATTTTGAGG
TGATAGAAATATTGATGAAATTAGAAATTGGCGGTGATTGCTAATGGGAATGGGGTTTATTTTGAG
GTGATAGAAATATTGATGAAATTAGAAATTGGCGGTGATTGCTAATGGGAATGGTGTTTATTTNGA
GGNGATNGAAATATTGATNAAATTAGAAATTG

| | |
|---|---|
| Sequence 1165 | cMhvSA059c12a1 |

CCCTTTCGAGCGGCCGCCCGGGCAGGTACAAAACAAAGACCCTTGCCTTCACTGCACTCATGTTCT
AGTTGTGCGTTGTGCGTGTCTTTATTTCTCAATAAGAGTTTCATGGCCCTACCACCTAAAAATGCCA
CAAAACAACAATCCCACAATCCCATTCAGAAAGTGAATGCATTTAACTTGAAACACGCAGTATAA
ATCTAAAGGAACAGGGTCAAATAAATGAAGCTGAGGCTGTGGCTCATACTTGTAATCCCACCACTT
TGGGAGGCCCAGGTAGGATGTTCACTTGAGGCCAANAGCTTGTTACCAGCCTGGGCAACAAGGTG
AGACCCCATCTCTATTAAAAACAAACAAACAAACAAACAAACAAACATGAGGCTGAGAAAAAAA
TGGCAAGGGATATCAAAAACT

| | |
|---|---|
| Sequence 1166 | cMhvSA059e10a1 |

GGTACCTGGCTGTGCTAGACAGGGGAAAGGAGATGCTTTCATTGCTGGCATTTTAATGGGGTCCAG
GACACTATGGGGAGGGGATTTAGGAAGAAGGCTAAGCCAGCAGTGGAAGACATTTGGAAGCTTG
GGGCANTGGAATTTGCCAACTGAAACAGGAAGTATTTGGATAAATTGAAGGTATGGGATGATGGG
GTATGCCTGGGTTGTAGGACATGGAAGACGTNAGTCTGGGGCCTGCTTAAGTTCATCCCTNAAAAT
GTCTTGCCTAGGGACCACTGTGATTTTNTAATAATATCCCTTAATTCTACTCTAGATGATATCTTTT
AAAGAACCTTTACTTTTTGAAAAAAGTAAA

| | |
|---|---|
| Sequence 1167 | cMhvSA062a03a1 |

CCCTTTCGAGCGGCCGCCCGGGCAGGTACAGTCAAATGCAGAAGGCATTGTATTAGCTTTTTGCTG
CGTGTAGTTGAAAAGGTTTGGAGGTTTGGAGGTCGTTTTCTGGCCGGAGAATACATAATTCTTGGG
AAAATGAGCTGGAAGATAATGAGAATCTACCTTATTTCTCTGCACAGGAAGATCAGTCTGCCTGCA
GTTAGCTAATCTCCCTGAACCTTGCTCACTACATCAGGAGACCATAAAGCAAAAGGGTAAATCAA
CAGTTCCTTTAAGACACTTTATCCAAAAGGATTCTCCTTTCTTGCCTGTAACTCTGACAAGGACAGT
GAGGGTGAACGCTCCAACTGTCACTGTTCAGGAAAAGGCCAGCTTATCCTGCAGCCTCAGCTTCCT
GGGCGGATGATCCC

| | |
|---|---|
| Sequence 1168 | cMhvSA062d06a1 |

CCCTTTCGAGCGGCCGCCCGGGCAGGTACAGATTAAATAGGTTAACCTTTATGTGGGTAAATTATA
TCAATAAAGCTGATGAAGAACTGGTAGATGACAAGTGTAATATAAAGGCAACCATAAATACAAAA
TACAGGAATAAGCAATTTACTTAGAAGATAAAAAAGAAGGCTTCTGGCCAGGCGCGGTGGCTCAC
ACCTGTAATCCCAGCACCTTGGGAGGCCAAGGCAGGCGAATCACAAGGTCAAGAGAGATCGAGAC
CATCCTGGCCAACATGGTGAAACCCCGTCTCTACTAAAAACACAAAAATTAGCTGGGCGTGGTGG
CGCACGCCTGTAGTCCCAGCTACTCTCGGGAGGCTGAGGCAGAAGAATTGCTTGAACCCGGGAGG
CGGGG

| | |
|---|---|
| Sequence 1169 | cMhvSA062e11a1 |

CCCTTAGCGTGGTCGCGGCCGAGGTACATGCCTGTAATCCCAGCTACTGGGGAGGCTGAGGCAGG
AGAATTGCTTGAACCTGGGAGGCAGAGGTTTTAGTGAGCTGAGATCCCGCCATTGCACTCCATCCA
GCCTAGGTGACAGAGCGAGCGAGACTCCATCTCAAAAAAGAGAAAGAAGAAGAAGAGAGCTCAA
CAATGCAGCCAGGGAAGATTTCCTGTAGGAGTCTTGAGACAGGAGAAAGAGAGATGGAAGAGAA
AGAAAGCGCATGCTGCCTCTTGAAAAAATGGANAGATCACCCCCGCGTACCTGCCCGGGCNGCCG
CTCGAAAGGG

| | |
|---|---|
| Sequence 1170 | cMhvSA062f03a1 |

CCCTTTCGAGCGGCCGCCCGGGCAGGTACAGTGGAGCCAAGATTAGATCCAGGGGACCTGGTTTC
CCAGCCCCATCACCTCAGTCCTATTGCATTACCCTCTGGAAATGCTCAGTCCAGTAAAGGAGAGAG
TGATGATGCAATGATGTGACTGCTTCCAGTGAAGAGTAAAAGTAATGAACTAGAAACGGGAGAAA
CAGATTGACACCCTTGAGTTGTCTTTCTGGTTAGGGCTTTTGGGTTTTTGTTCTGTAATACAGTCCA
ATGTGGTGGCCATTCAAGGGAGAAGGACCACTCATCAGCCCTCCTGCTCCCTCACCCCCATCTTAA
TTAAATAAGCCTCCTTAGGATCTCACACACCTGCATGTAACAAAACAGGTTTTAAAAATCTG

| | |
|---|---|
| Sequence 1171 | cMhvSA062g09a1 |

CCCTTTCGAGCGGCCGCCCGGGCAGGTACGTTGTCTTGTGGAAATTTTAGAGTTGCTTCCTTATTTA
GGGAAGATAATTTACTCAACTCCCTTTGAACACGTTTGCTAATTCCATTTAGGTTTTATTCCAGTAA
ACAATAGAATTGACCCTAGTTTTACTAATCATATTAAATTTTTATATCTTAATTATAATCCAGAGAG
TATCCGCTGGCTAACCTAATCTGAAAATTAACTAACTCGTGGAGGAATATTCAAGCATTCGGATAG
TTTTAAATTCAACTGTGCTAATACAAAAAAAAATTAGCTNGGCATTAAAAGGTTAGAGGAGGATA
TGTTTGTAAAACTAAATGGACCGATGAAAACCTGGACTTTATATCATAGAAGAACAGAGTGAAGG
TAAATTGCACTGCC

| | |
|---|---|
| Sequence 1172 | cMhvSA062h07a1 |

CCCTTTCGAGCGGCCGCCCGGGCAGGTACTTACTTTGATTCCTCTAGTGCAAGATTATAGTGGGGT
TATACCTGAGACTTCAATAAATGTTTGACTAACTAAACTAAAATAGCTTAGGGTAAGGACTACTTC
CCCAAACGCCCTTTTAAACATGTGAGAAAGGGAATCTCCCTGACATACTGGTATGGCCATTTGTAG
CAATATACTGAGAGTGACTTGGGTGATTTTCTGGGGCGATCAACCACATTCCATGAGCAGGTTAAC
TGTGGAAGACACCTGCCCTTGAGCATCGCGTTTGGGCCACATGCGTCAATGGGGAAATTTGTGTTT
CCATTCTGCTTCTTGTTTTGCCTTCACAACTTCAGGGATAGAAGCGTATTCCATTTTTA

| | |
|---|---|
| Sequence 1173 | cMhvSA062h09a1 |

CCCTTTCGAGCGGCCGCCCGGGCAGGTACTTTTCTTTATGAATGTTATACCAGAACTTAGGAGGAA
AAAATTTTTGAGCATACTGAATATTAGGAATTGGATATCTCCCTAAATTATTAAAGTTCATCTTCCA
TAAATTCTGTAAAACTGAATGTAGTATTTCCCCCTCTTCCCATGCAAGTAACTGATATCACTTTAGA
AAACCTGATATGAACATTATTTGTTATTGTGCTTTTATGAAGAATTCTGTCTAATCTTCTCATAAGA
AGAAAGAATTAGAACCAAAAATCTAATTATCAGATTTAGTAAGATGTAGGCAAGATCCACCTATT
TTTTTCATTTATGTCTTTCAAAATCAATCACATTCTATTATTCACCGATCCACTAAACAGATG

| | |
|---|---|
| Sequence 1174 | cMhvSA002g07a4 |

CCCTTAGCGTGGTCGCGGCCGAGGTACGCGGGGAATTGCTAATGGGAATGGGGTTTATTTTGAGGT
GATAGAAATATTGATGAAATTAGAAATTGGCGGTGATTGCTAATGGGAATGGGGTTTATTTTGAGG
TGATAGAAATATTGATGAAATTAGAAATTGGCGGTGATTGCTAATGGGAATGGGGTTTATTTTGAG
GTGATAGAAATATTGATGAAATTA

| | |
|---|---|
| Sequence 1175 | cMhvSA002g09a3 |

CCCTTGCACTGTGACAAGCTGCACGCTCTAGAGTCGACCCAGCAATCTCCCTGCTGCTCCGTCGTC
CGCCAGGACGTGAAGCATTCCCGGGCGACGTTTTCTACCTCCACTCTCGTCTGCTGGAGCGTGCTG
CACGTGTTAACGCCGAATACGTTGAAGCCTTCACCAAAGGTGAAGTGAAAGGGAAAACCGGTTCT
CTGACCGCACTGCCGATTATCGAAACTCAGGCGGGTGACGTTTCTGCGTTCGTTCCGACCAACGTA
ATCTCCATTACCGATGGTCAGATCTTCCTGGAAACCAACCTGTTCAACGCCGGTATTCGTCCTGCG
GTTAACCCGGGTATTTCCGTATCCCGTGTTGGTAGTGCAGCACAGACCAAGATCATGAAAAAACTG
TCCGGTGGTATCCGTACCGCTCTGGCACAGTATCGTGAACTGGCAGCGTTCTCTCAGTTTGCATCC

| | |
|---|---|
| Sequence 1176 | cMhvSA032g03a3 |

CCCTTCGAGCGGCCGCCCGGGCAGGTACCAGAGGAGGAGATGGACGATCAGAGCCATGCGCCTGT
TTCCTGCACCCCCTGCGCACTGGTTCTATGGCCACAAGGAGTCTTACCCAGTAAAAGAGTTTGAGG
TGTATCCTGAGCTGATGGAAAAATACCCATGTGCCGTTCCCTTGTGGGTTGGACCCTTTACGATGTT
CTTCAATATCCATGACCCAGACTATGTCAAGATTCTCCTGAAAAGACAAGATCCCAAAAGTGCTGT
TAGCCACAAAATCCCTGAATCCTGGGTTGGTCGAGGACTTGTGACCCTGGATGGTTCTAAATGGAA
AAAGCACCGCCAGATTGTGAAACCTGGCTTCAACATCAGCATTCTGAAAATATTCATCACCATGAT
GTCTAAGAGTGTTCGGATGATGCTGAACAAATGGGAGGAACACATTGCC

| | |
|---|---|
| Sequence 1177 | cMhvSA033d01a3 |

ACTGCAGCTGGTGGGTCACCAGGACGACCGTCTTCCCCCTGAGTGTCTTCTTAATGCACTCCTCAA
AAATGTGCTTCCCCACGTGGGCGTCCACAGTAGACAGGGGGTCGTCCAGCAGGTAGATCTGACGG
TCGGAATAGACGGCGCGGGCCAGGCTGATCCTCTGTTTCTGCCCCCCAGAGAGGTTGAGGCCCCGC
TCTCCAATCTCTGTCATGTCTCCAAAGGGCAGAAGTTCCAGGTCCCGATTCAGGGAGCAGCAGTGG
AGCACCTGGAGGTATCGGGCCTTGTCATACCCGCGTA

| | |
|---|---|
| Sequence 1178 | cMhvSA037e06a3 |

ACTGAACTGGGAGGTTTTTAGTCTGATAGCCACAATTTTGACCTAGGCAGGAAGCTTTACAGCTTG
AGGCAGTTTCATGGTCTGAAGACAAACTTCTTGTGACTTGCTGCCGGTGTTGGACTGCAGGAGAGA
GCCTCACTGGGTCAGGAGCACGAGAACAAAGTGGATCCCACTA

| | |
|---|---|
| Sequence 1179 | cMhvSA054c03a1 |

NGGGGGNCNTTAGCGTGGTCGCGGCCGAGGTACATTGGTATGAGGGTATTACTGGGACCAGGCAG
GCCAATTCGTGGGCACCCAGGTGGCCTGCTCAAATACTGGTAGTGGAATCAGTGGATTGAGCAGA
TGAGAGGGTTCTTGAGTCACTGGATAACCNGNGTGATGTGGGTGATGGTAGTAGTGGGATGATCC
TCTGGGGCCCAAGTGTTGCACACTGATGTTGACACTGGCTACAGTGCACGGTCACCAGCCAGAGTC
CCAGACACACAACTCTCAGGTTCTTCCACTCTCTGTGACAGGGG

| | |
|---|---|
| Sequence 1180 | cMhvSA002b03a3 |

ACTGAAAAATNTCATGTCCTGGGAAACCCCTCAGTCCTGGGCAAACTGAGACCGGTGGTTATCATA
CAAAGAGAAAACCAAATAAGACTAAAATTATGTCCAAACACTTTCATTGTGGCTAGGAACACAAG
TTGAACACCCTAATAAGGAACACAAATAATAAAAGCTTGCATTATTGAGTGCTTATATGGGGTAA
GTATTATACTATTATCTCCATTTTAAAGATAAGCAAACTGAGACATAGTAAGGGTAAATAAGTTAG
TTAGTGAAGGCACCAGAATTTAAACCCAGAAAGTTTGGTTTTAGAGCATACACTACAATCAGCACT
GTATGGAAAGATATNTAAGAGCAGAGACAGGCNGAGATGGGAGCACTGGGGAAGACATCATGGA
GGGGCTAGATGGCTACATCTTGGCTTTAAAAAGTGAGCAAAAGTAAAAGTTAGAAAGGAGATGAA
AGTATCATTTATAAATGG

| | |
|---|---|
| Sequence 1181 | cMhvSA002b03a4 |

CCCTTTCGAGCGGCCGCCCGGGCAGGTACTGAAAAATCTCATGTCCTGGGAAACCCCTCAGTCCTG
GGCAAACTGAGACCGGTGGTTATCATACAAAGAGAAAACCAAATAAGACTAAAATTATGTCCAAA
CACTTTCATTGTGGCTAGGAACACAAGTTGAACACCCTAATAAGGAACACAAATAATAAAAGCTT
GCATTATTGAGTGCTTATATGGGGTAAGTATTATACTATTATCTCCATTTTAAAGATAAGCAAACT
GAGACATAGTAAGGGTAAATAAGTTAGTTAGTGAAGGCCCAGAATTTAAACCCAGAAAGTTTGGT

| | |
|---|---|
| Sequence 1182 | cMhvSA002b04a3 |

ACAACCCTACCACTACTCTACATCATGGAAGTCTTAACGATTTAGGGTAATACGATAATGAGAATA
CCAATATGGATCTATTAAATGAGGAGCTGAGTAAGCTCCAAATTTCCCTCTAGATTGGTAAGTCTA
TAATTTATTATATGAAATTCCTAATTATTACCATACTAAGTTCAAAAGATTTTAACCCAAATCCTTT
AGTAACTGATAAACCTCATTCTTAAGATTCTTGACAGAAATAATCTTGATGAGCTTCTTCTCTTCAT
GATCTTTCCAATGCTGTTATAATTTTGAGGGAATTACTCTTATTTTCATTAATTCTGTTGCAAGGAG
GAAAAGACTGACTCTGTGTTGGGGTTTCTTTTCTCTATAAGGCACAAGACCTAAATGTCATTGAAG
AAGTGATTCGAATGATGTTAGAGATCATCAACTCCTGCCTGACAAATTCCCTTCACCACAACCCAA
ACTTGGTATACGCCCTGCTTTACAAACGCGATCTCTTTGAACAATTTCGAACTCATCCTTCATTTCA
GGATATAATGCAAAATATTGATCTNGGTGAGTGTNAATGAAGACATTTATTATGAATCTTTT

| | |
|---|---|
| Sequence 1183 | cMhvSA002d10a3 |

ACGCTAGGCCGCGGCCTTCTTTTCTCCCAGAAAGGTGACCCTCCCCACCCTGCGTCCTGCTCCTTCC
GTCCATACTGATGTTTGTTTTGCTGGAGGCCAGTAGCAACTGGACAGTAGCTCTAGGGGAGGAGA
ATCCACCTGCGGCGAAGGGTGGGATTTGTTTTCTTTGAGCCTTCTCCAGTGTGGGGCAGCTGGCGC
ATCTCCACTTAGCGCCGGGGGTCCGGGATCCTACATCGCAGGGACTGGGGATCTCCTGGGTTCTGT
ACC

| | |
|---|---|
| Sequence 1184 | cMhvSA002e06a3 |

CCCTTAGCGGCCGCCCGGGCAGGTACAGAGCTGGAGGCCCAAACAGCCAGCCAAATCTTGCTGTA
TTTTATCCACCATAGTATAATCCAGAGACTGTGGACCCCAAATTGGGATGCTTTTAAAATCCAAAG
TAGTTCTGTATACACATTTGAAGAAAAATGCTGTTGAAGAAATGTATCCATAAAACACTTCAGGTC
AAAAAGCAAAAGAATATCAAGAAAAAGTTTAAATAACATGATTCCTACTGGTTTTAGATCATAAT
TATCATCCTATATTATTTATATTCGTATCACTGTTATCTTTCTCTGACAAATAATTCTGAAATACAAT
ACATTTTAAAGTTATGCAGGATTTTAAAGACCTCGTCTTCAAGCAAATACAAGAAGTTTAATAACA
AACTTTAAATAAATGCTCATTTAAATAAAAGTTTATTTTTCTCCTGGCCAAATATTTGGTGAATTAC
TTACAAAGATACTTTCAATGATTAGATTCCTTAGCTTAAAAAAAAATTCATTTGAATACGCTTTAG
CCCAA

| | |
|---|---|
| Sequence 1185 | cMhvSA002f09a3 |

GGTACCTGAAGCCTCTGTCTGACTTTCCAGTTGGAAAGGACATGCTTTTGTTTCCCACCGACTGTTT
AATTTTTTTGGCTGCAATGCATTTCTTGCCAGACGGGGTCTGTTTATTTGGATCAAACTGAGAAGA
AACTTTGGATTTGCTGTTTCCAGCAAAAGCCTTGAAGTCTGACTGGCTGTAGTCGTAAGGCGTAAA
CTCTTTTTCTGGTGGCTCTGGGTCCTTTGGCTTCTTGGAAATTTTGAGTCGTTTCTTCTCTTGTTTCT
GTTCTGTGGTCCTTGGGTCGCTTGTTGCTCGCTCTCTCTTCTTTGCAGCATTTTCTAGCTGTAGATCA
GGAACAGATGTGGGGGAGGAACAGGGAGGCACATGGGAACAGGGAACTCCACCGGCCTCAGCAA
TAGCTGGGACCCAGCTGCCTAAGTGGTAAGAAGAACAGTCAGTGGTGGGGAGAGGAGCTGTGGCT
GGAACTTCGGGACCAACACTCANGGTCAGCTGAAACAAATTCCTCACTGGACAATGACATGANGT
CATTTAAGAAANGCAAGCCNGCCAGGTGCANTGGCTTCATGCCTATAATTCCAATGCCTTTGGGTG
GNCTAAGTNGGAAGACTGCTTTAAGCAATCTGAAACANCCCNGGCCAACATAACAAGANCCTATN
TTTCNAAAAAAAAAAAAAAA

| | |
|---|---|
| Sequence 1186 | cMhvSA002f12a3 |

CGAGGTACGCGGGAATTGAATGTCAACTTTAGCTGTGACTTTTCTGGCAGCTAGAATAAAAGTAAG
ATCGTTGTCTGATAGAACTGAATGTCTCAGTTTATTAGAACAACAAAATACTGTAATCTTTCTCAA
AACCTACATGGAACAAACTGGAACAAGTATTTCATGAAAACCAAATGAAAAATAAGTAAATAAAT
GATTTCATCACCACTGTCACCAAAAACAAATGAATTTTTTGGATAGGAAAACATGGCTAAGTTGGT
AATTGACTGAGACATTGGCCTGGTGTGTTATCTGTGGTTGTATTTTATTAAACTTATATTTACAGAA
ATGGAAAAAAACTAACTTTTCATACAGTTTGGTGTATTCATAGCAAAATATGAATAGAAATCACCT
CTGGAATCTTGATGAACAAGGCCTTTAGTGGTTCATTGGTGTAGAATGAATATCAATTTAGAGAAA
TAGGTCTATAAGTCAGGAAGTGATGCAGAAATGTCATAAGGCTTATTCATAATCACAACATTTTTC
AAATTTTTCCACGTTAAATCTGAAATTTTAATTTCTTTGATAAAAAATCTGGTATTTTTGATTTTTTT
TACTTTTGGTTTGATTTGGAAA

| | |
|---|---|
| Sequence 1187 | cMhvSA002f12a4 |

CCCTTAGCGTGGTCGCGGCCGAGGTACGCGGGAATTGAATGTCAACTTTAGCTGTGACTTTTCTGG
CAGCTAGAATAAAAGTAAGATCGTTGTCTGATAGAACTGAATGTCTCAGTTTATTAGAACAACAA
AATACTGTAATCTTTCTCAAAACCTACATGGAACAAACTGGAACAAGTATTTCATGAAAACCAAAT
GAAAAATAAGTAAATAAATGATTTCATCACCACTGTCACCAAAAACAAATGAATTTTTTGGATAG
GAAAACATGGCTAAGTTGGTAATTGACTGAGACATTGGCCTGGTGTGTTATCTGNGGNTGGATTTT
ATTAAACTTATATTTACAGAAATGGAAAAA

| | |
|---|---|
| Sequence 1188 | cMhvSA002g03a3 |

NGGAGTCGACCCCGCGTCCGCTTACATATAATGCAACTTATATGTAAGTTTCATCAACACAGACTG
AGTATATAAGTTGGCTAAAAGTAACAATACCCATCTAACAGTACAATGCTGTCAGAGACCCAGGC
TCTTTCTGGCTTATTGTAATTCATTTCCTTAGCATGTTGGGTTTTATCTTCATTCTGTTCCCTTCACA
GTTGTGGAATTCCTGTTGCAGCTTCATTTTTTAAGGACACAAGGCAGGAAAGGGGAAGGGCAACT
CCACACGTGTCTGTCTTCTTATCTTGAATTGCAAAGCTGTCCCAGTACCTTACCACCTACTTGCTTC
TCTAGCAGATTCTCTTCCATATTATTTAAGCCACTGGGTCACTCCAGGTTACAAAGGTAGCGGTAT
ATTGAAACTTTGAAATTTCAGCCTCCATAGTAAAGAAGGGCAAGGGAGAAACGGTGTTTGTTTAGT
CAGTCTAAATTGTCAAAGGAGATAGCCAGATATCTCTTTTTGAGAGATAAACAGACACTCTTCATT
TAAACATGGTATAACTTGGCTTTAAGGCATATTTCTTTAAAAATATATTGTCAAGGACTGCGAAGA
GCCTGAAGCTACTTTGCCATACTTTCANGGCTAGCAGAAGACAGGAGAATATTTGGTCGGGGAAA

| | |
|---|---|
| Sequence 1189 | cMhvSA002g06a3 |

GATNGTTTTTTGCANAATNNNCCCTTTTNGNGGGGGTGAGGGGCCGNNNGNACCTAAAANNCNTT
GTTTTAANACNATNTGNTGCNACNTTTTGNCAAANCCAAAGAAACGGCCCTTGTCGCCCACGACA
CGTTTGCGTAAGGCGCAAAGCTGGAAAAGTGCAAGTCCTGTGGCTTTCCAAAAGGCAGCGGGAGG
CATTGGTGCCGGTTTATTTTTAAG

| | |
|---|---|
| Sequence 1190 | cMhvSA003b08a3 |

NNAGCGGCNGCCCGGGCAGGTACCCATNATGCNCACTGCAGGCACAACTCCAGATGAAGGACTAT
NGAATATATGAATCGGCAACGANNATGGAGGTGGTCCTGGGGGTGATTATTGCAGCCATGGGGGC
NCTGCCCANCATCTGAGCCAAGGGTNTTGNAANGAGAATGGAGAAGCTTTTTTCAGGGGGCTCTT
GGGACNATCAGGGCCCCCCCATGNTCNCATNTATGTCCTCGCCTNAAAAAAAACTTTTACCGTTAA
GCTTTTAGNAGGGCTAACAAGACCTCCTTGCCCTTTTGAANTAAACNCCTTGAATNTACTTGGGCN
AATAACCAAAGGCCTTTTTCCCCCCAAGGGCTTAAATNGCCCCAGGAAGAAAACGGTTAAACCTT
CCCTTGGCTTCCCTTGGNNGGGGCAACCTTCGAGNGGGGNAGGCCATTTTTTA

| | |
|---|---|
| Sequence 1191 | cMhvSA003c02a3 |

CCCTTGCACTGTGACAAGCTGCACGCTCTAGAGTCGACCCAGCATGGATATGCTGCTGATGAAATC
ACTCACTGCATACGGCCTCAGGACATCAAGGAGCGCCGAGCAGTCATCATCCTCAGGAACTTGCG
ATGTTCTTCACCGAGGAAGCTTTCGCAGTAGATCTTATATGCGTCTTCCGTGCCTGACGGACGCGC
GGCGAACCAGCCGTTGTCAGTCATCACTTTCAGACCGCCAATAGAAGCACCGTTGCCCGGAGCAG
CAGTCAGGCGCGCGGTGATCGGGTCACCTGCCAGGGTGCTGGCGCTCACCATTTCCGGAGACAGC
TTANACAGCGCCGCTTTTTGTGCGGAAGTCGCAGCTGCCTGCAAACGGTTGTAGCTCGGCGCACCA
AAGCGTTTTGCCAGTTCGTTGTAGTGTTCCTGCGGGTTCTTACCGGTGACAGCGGTGATTTCCGCCG
CCAGCAGACACATGATGATGCCGTCTTTGTCGGGGGGACACGGCGTGCCGTCNAAACGCANGAAG
GAAGCCCCTGNC

| | |
|---|---|
| Sequence 1192 | cMhvSA003h02a3 |

CCCTTTCGAGCGGCCGCCCGGGCAGGTACCACTGGGCTTGCACTGTGTTCCAGGCGGTAGGGTCTT
CAACAGACACTCTGAGAGGTGGGATTGTAGGGCATCAGTTTCTGCAGACACACTACAAGTGTNTG
GCAACACTATTGNGGAGGCTAAAGTAACTCCATCTCANATGCTAATCCACAATGTTTGATTTCTGA
GTAACCCCAAGTTTTNGGAAGGCCNCNANGNNCNCNACCTTTNTCTNTNGGGGCCNCTGNAATAA
ANCANCCNTGTNGGCCAGGGNTTGTTNTTTTACAATTTGGTTNTTAAAAGGAAAAATACNTGGCTN
GGGGGCCNCCNGTTGGGCNTCATTGCCCCTGGTGGATCCCCAAGCCACCTTTTGNGGAAGGCCAA
NTGGGCAAGGGGNAGGGATCCAATNTTTGGAGGGTCACNGTAGGTTTNAAAGNACCCAGGCCCTG
GGGCCCAAACATTGGGGTGNAAAAACCCCNCAATTCCTTCTTNACCCNANAAAAANTTNACCAAA
AAAAAAAACCCACGCCTTGGGGGCCGTTTNGGTGGGCCGGGGGTTGGCCCCTTGGA

| | |
|---|---|
| Sequence 1193 | cMhvSA003h02a4 |

ACCACTGGGCTTGCACTGNGTTCCAGGCGGTAGGGTCTTCAACAGACACTCTGAGAGGTGGGATT
GTAGGGCATCAGTTTCTGCAGACACACTACAAGTGTCTGGCAACACTATTGTGGAGGCTAAAGTA
ACTCCATCTCAGATGCTAATCCACAATGTTGATTTCTGAGTAACCCCAGTTTTGGGAAGGCCTCCA
AGTTTTCTACTTTATCTATTGTTCCTTGTATAAGAGCATGTGGCAGGCTGTTCTTACATTGTTATAA
AAAAAATACAGCTGGGCGCGGTGGCTCATGCCTGTGATCCCAGCACTTTGGGAGGCANTGGAGGG
AGGATCATTTGAGGTCACNAGTTCAAGACCAGCCTGGCCAACATGGTGAAACCCCATCTCTCCAA
AAATACAA

| | |
|---|---|
| Sequence 1194 | cMhvSA003h12a3 |

ANAATTCNCCCTTAGCGGCCGCCCGGGCAGGTACAANACTTGGCCGAAATCTGTCAGGTCAGCCC
AACTTTCCTTGTCNGTGTCAAATGCTGTGCCTCTGTCCTATCACCGGGAGAAAAAAATGGGTTCAT
TGNGGACGCCCTGCCNAGTTTATTTGTTTNGTCTCGGGGTGGGGAATTTATACCCTTTTTGGGTNTC
CAAATCTTTNATATGAAAAANGGGNTCNCCCATTCNTTNCAACCGGACNTTTTCCTGNGGGCAATN
NTTAAAAAAANACNTAATNTAATGGTTCCTATTGNGCCTNTNCNATTGNATTGCCCTNGGGTCGCC
TTGGGGTATAATTCCCTNGNTGGCCAATTTNGGNGGACCTTGNTCCTTGGTGGANAGAACNTAATT
TTGGTTGGTGGCCAACCAATTATTTTNTTTNCCTANCTTAAAAANTTGGCCAANGAAAAGGAATTT
TAACCAAGGGGTTGGGGCCAAAATGGGGNACCAAAAGGTTTTTTCCTTCCTTCCTTGGCCCTGGCC
ATTCCCAAACCTTGGCCAAAATTCCTNAATTGGTNTTTNAACCAATTGGTNAATTTCCCCTTTTTTT
NACCTNACCTTAATTTTTTTTTTCCAAAAAAACCCANAAAGGNAATGGTTAATNGGGGCCTTTTNA
TTTTTTCNAAAAACCAATCCAATTTTTTTAACCTTTTTGGGGAATNNTTAATTGGGGCCGGGGG

| | |
|---|---|
| Sequence 1195 | cMhvSA009g03a2 |

GGTACAGCTGGGATTTGAACTTGGCATTCTAGCTCCAGCATCCATGGCCTTAACCACCATGCTGTC
CTTTCTCATTTTGATTGAATAGGCTAATACATTCCTTGTCCTTAGAATAGAGTCTTGCCTGTAGTAA
GTGTTCAGGTGGCAGCTTTAGGGCTCTCACTTATCCCATTGGACTGGGAGTCAGGCTTGATGCTTC
CACTAAGTATCACACAACCTTGGCAAGATTCTTGTGCCCCGGTGAAATGAAAGGGTTGGACTTGGG
GGCCTCAAGTCCAGCCCGCACTGCATCCTGATCTTCTCTCTCCATGCCCCATCACCTANACCCATCC
ACTGTGGAGGACAAGTGTGAGAAGGCCTGCCGCCCCGAGGAGGAGTGCCTTGCCCTCAACAGNAC
CTGGGGCTGTTTCTGCAGACAGGACCTCAATAGTTCTGATGTCCACAGTNTGCAGCCTCAGCTANA
CTGTGGGCCCAGGGGAGATCAAAGGTGAAGGTCGACAAATGTTTTGCTGGGGAGGCCTGGGG

| | |
|---|---|
| Sequence 1196 | cMhvSA009h07a2 |

CCCTTTCGAGCGGCCGCCCGGGCAGGTACTGTGTGACAATGACCTGGATATGGAAGCAGAAGGGA
GCTTCTAAGGACCGGAAGCTGAGAGTCTGTCTCCTGTCCCGGCCCGGACACTGGGGTTCAGGAAGT
TTAAGAACAGACACTGTCTTGACAGGAACCAGAGCCTCAGTGTCTGCAGGAGTTGCTGGCTGTTTC
CTGATGCAGTTGGAGCAGAATGGGATGTCCTGGGACAACAGAAATGTTTACCCATCTTGACTAGTG
TGGTCATCTGAAGAATGGCCTCCAAAGACATCCTGAGAACCTGGGAATGTTGCATGGATGAAGGA
ATTTGCAAAAGTGATTAAGTTAAGGAGCTTGAAATTTGTGGATCATGCTGGGTTACCCCAGTGAGC
TCTAAATGTAATCACATGTGTCTTTATGAAAGGGAGGCAGAGGGAGATTTGCAGACAGATGAGGA
GGAAGATGAGAAAACAATGGACACAAGAAAGAAAAGGTGATGCAGTTCANGGACCCAACCAATA
AAATGANGTGACCTCCAGATGCTTGGAGAAGGG

| | |
|---|---|
| Sequence 1197 | cMhvSA010c03a3 |

CCCTTAGCGTGGTCGCGGCCGAGGTACTTTGCTACACGGCCGGGGGCCATTGAGACTGCCATGGA
AGACTTGAAAGGTCACGTAGCTGAGACTTCTGGAGAGACCATTCAAGGCTTCTGGCTCTTGACAAA
GATAGACCACTGGAACAATGAGAAGGAGAGAATTCTACTGGTCACAGACAAGACTCTCTTGATCT
GCAAATACGACTTCATCATGCTGAGTTGTGTGCAGCTGCAGCGGATTCCTCTGAGCGCTGTCTATC
GCATCTGCCTGGGCAAGTTCACCTTCCCTGGGATGTCCCTGGACAAGAGACAAGGAGAAGGCCTT
AGGATCTACTGGGGGAGTCCGGAGGAGCAGTCTCTTCTGTCCCGCTGGAACCCATGGTCCACTGAA
GTTCCTTAT

| | |
|---|---|
| Sequence 1198 | cMhvSA018a03a3 |

CCCTTTCGAGCGGCCGCCCGGGCAGGTACGCGGGAGTTTTAATTTTTCCAAAGTATCATATGAATG
GAATCATGTGATATGTAGCCCATGAATCATGTATATGGGTTTTTCACTTAGTAGAGCACATTTAAG
ATTCATCATTGTTGCTATGTGAATCAATAGCTGGTTCCTTTTATCTCTCCGCAGCTCCTACTGCACT
GAGAAGCACGTGTTCTCCATTTCCCTGGGGGAGACCATTGTATTGGGCAGTTTGGAACAAAACACC
ATGGACTGGGAGGCTTACACAACAGAAATTTATTTCTTGCTGTTCTAGAGGCTGGGAAGCT

| | |
|---|---|
| Sequence 1199 | cMhvSA018b09a3 |

CCCTTAGCGTGGTCGCGGCCGAGGTACTTTGCTACACGGCCGGGGGCCATTGAGACTGCCATGGA
AGACTTGAAAGGTCACGTAGCTGAGACTTCTGGAGAGACCATTCAAGGCTTCTGGCTCTTGACAAA
GATAGACCACTGGAACAATGAGAAGGAGAGAATTCTACTGGTCACAGACAAGACTCTCTTGATCT
GCAAATACGACTTCATCATGCTGAGTTGTGTGCAGCTGCAGCGGATTCCTCTGAGCGCTGTCTATC
GCATCTGCCTGGGCAAGTTCACCTTCCCTGGGATGTCCCTGGACAAGAGACAAGGAGAAGGCCTT
AGGATCTACTGGGGGAGTCCGGAGGAGCAGTCTCTTCTGTCCCGCTGGAACCCATGGTCCACTGAA
GTTCCTTATGCTAC

| | |
|---|---|
| Sequence 1200 | cMhvSA018b12a3 |

CCCTTAGCGTGGTCGCGGCCGAGGTACGCGGGGGAGACACATTCAGAGGTGAGCCCAGAGCGGGT
AAAGTGGACTGGGGAGAACTTCGGAGGATGTTCATGTCCAGGAGCAGCCCCACGCCCTGTATGGT
CGGTGTCTAGAGCCTCACAGCAACTAAGACCAACCCAGCTCTCAGAAGAAGGAATGTCAAAATGT
CATGTTCAATTTTACATTCAGTGCCTGGAATCTTTTCTTCACAATTGAAATGAAATGTGCTGAAGGA
GGTGAATCCATGCATTAATCTTCAGCTCACAAAGGAAATCTACATAAGAAGCAAGGAACACGCAA
GAGATCTACAGCTCTGATCTCCANGATAGTGAAATGAGGTGGTGAATGATA

| | |
|---|---|
| Sequence 1201 | cMhvSA018e03a3 |

CAGGTACCCTTCACAATACATTGGCAAATTCTGAAGCTACAAAGCACAAGAGACCAGAAAGCCAA
GTAGAAAGCTATGAAAAACCATTTTTAGGAAGCTAGTATTAGAGTTCAAGACCCAGCAGTGAGGA
CAAGAGGCTTTTGGTGACTGTCTGGGGATTTCATTTGGAAAGTCTGGAGATTGGTGCCTTTTAAGA
AGGGACAAAACTAAGGGTAAGTGAACTTTGGTTCTAGGAATGGCAAGATCAGCAAGAAGATCACC
ATTGCCAACTGTAGCCTTTACACAATGTCATAGCAGCCCAAATTCAGTCAGCTATTGAATTAAGTT
TATTGTCTACTTGCCAAGCTAAAGAATGTATGAATGCTGTCTTTAGA

| | |
|---|---|
| Sequence 1202 | cMhvSA018f01a3 |

ACTTGCTTGGTCTCCCCTCCCTGGAAACGTTCTCAAATTGGTAAGAAAGGCAATTACAGGGCTCAG
CTCGTTTGTTTCCCACCTGTCAAAGCACTGTCCTTCATTGTCTGATGTCCAGTGTCTCAATACCATT
GTCTTCTTATTTATCTGGATTCTGGGGTTGTTTCAGGTGGGAGGGTAAATTTAGTCCCTGTTACTCC
ATCTTGACTGAAAGCAAAGTCCAGTTCTTTAGTTTGTTCTCCCTATGACAGACCTCAATCCCTCCGA
ATGATGGTTAGATGACTTCCTATTGGTTTTTCTATTGGCAAGATGGTGAACCATGGGTCACCTTCCT
CCATGACACCCTGACTGAGTTACCTCTAATATATGCAGAATTCTGCTGTATGTAGAAAAATTAAT

| | |
|---|---|
| Sequence 1203 | cMhvSA018h07a3 |

ACTGAAAAATCTCATGTCCTGGGAAACCCCTCAGTCCTGGGCAAACTGAGACCGGTGGTTATCATA
CAAAGAGAAAACCAAATAAGACTAAAATTATGTCCAAACACTTTCATTGTGGCTAGGAACACAAG
TTGAACACCCTAATAAGGAACACGAATAATAAAAGCTTGCATTATTGAGTGCTTATATGAGGTAA
GTATTATACTATTATCTCCATTTTAAAGATAAGCAAACTGAGACATAGTAAGGGTAAATAAGTTAG
TTAGTGAAGGCACCAGAATTTAAACCCAGAAAGTTTGGTTTTAGAGCATACACTACAATCAGCACT
GTATGGAAAGATATCTAAGAGCAGAGACAGGCAGAGATGGGAGCACTGGGGAAGACATCATGGA

| | |
|---|---|
| Sequence 1204 | cMhvSA031b01a4 |

CCCTTAGCGTGGTCGCGGCCGAGGTACCTGACATGGTGCCCAAGGACTGGGAGTAGAAGCAGAAT
CCCATCCACCTCCACCTAATCATACGGAGAAAGGAGACAGGAGCTGAGGGAGGGCAGTGCTATGT
CCAAGCTGTCAGCAAGCAGTAGGCAGAGCCCAGACCCCTGCTTTCCCATGCCCACCCCTCCCCAGT
TCAGGGCAAGGCCACCTCTCCAGGGCCTTTCCCTCCCCTAGAGAGGAAACTCCCCAAGTTCCTCTG
ACCAGACAGGAGAATGAACCAAGAGAAGAAAATTCCACTTAACACACACACCTGGAGCCTGAGG
CTGAAAGCTGGAATCCCAGACTTTGACACTCAAGAAGGCATCTCCACACTTTTTC

| | |
|---|---|
| Sequence 1205 | cMhvSA031b02a4 |

CCCTTTCGAGCGGCCGCCCGGGCAGGTACAGCTAACTGTGCTAGGCAGGGCAGCCCTGTGAGTTCT
ACTGCTGTCTTGGTTTTACAGAGGGGGAAGTGAGGCACAGAGAAGTTAATTAACCTCTGAAGTGTT
GCAGTCTAAGGCACAGAGGCACAGTTCCAGGCAAGGTTCATCTGAATCTTAAGTCCTCACTCTTTG
CCACCATCCTCCACTGCTGAGACCATCCCTGTGAGTCCTGCCGCTCTCCTCCCCTGGTCCATATTCA
CTGCTACTCAATGAGGCCAAGGAAGCCAATGGTCGTGTCCCCAAGAGGATATCTCTCCCCTCCTGA
GAATCTTTCTCATACATCTCAATTCTGAGATACAGATTGAGAAGCACCTCAGCAAATCCACTGCAT
GGAAGGCAAAACAACCTTGA

| | |
|---|---|
| Sequence 1206 | cMhvSA031c11a4 |

CCCTTTCGAGCGGCCGCCCGGGCAGGTACAGTCAGGGTTTTGTCATGTTGTTTAGGCTGGTTTTGA
ACCCCCGGACTCAAGCAATCCACCCACCTTGGCTTCCCAAAGTGCTGGGATTATAGGCATGAGCCA
CTGCACCCAGCCAATTCTCCAAATCTCACAGCCAAACTGCAACTAAATTCCATCTCAAACAAATAT
TCAAATGCAGAAGACTCACCCATCTAATCAAGGCAGTTTTAATATTTAGGGGAAAAAAAATGCCT
GGATAAAACTGTAAAACCAAGCATGATAGAAGAGATACTTTTAGGAATGGGGGAGGGATGACAA
AAATAAAACGAGAAGGTAGATAAGAATGGAAAGAATACTAGAAGACAGCCTGCCATGAGGTTAT
ATTTTACCAGGGGGGTGATGGGTGCACCCAAATC

| | |
|---|---|
| Sequence 1207 | cMhvSA031h04a4 |

CCCTTAGCGTGGTCGCGGCCGAGGTACAAGGACTACAGGTGTAATCCTCCGTGCCTGGCCTGATGT
TTTTTACATTAATAGAGCTTATAACTCATAAGAATTATGTTAGTCTGGTGTATATTCTGTTTCCTTCC
TGCTCCTGGAGAAAGACAATCATTTTGGCCTTGAATAATTTCTTAGAAATGCAGATGTAAAATTTA
AAATACACACACACACACACACACACACACACACNCTNTGTTCANCCAAAACACTAGCAAGCCTN
TAAAAGTNNGCCAACTGACATTTGNNNATATNCCTCACCACTCTATTGCAAANATGAAGAAACAN
GCTTATTGACATTTTANATGGCTAAACTAACTATGAGATNTAGGGCTTCTCTA

| | |
|---|---|
| Sequence 1208 | cMhvSA032b02a3 |

CCCTTTCGAGCGGCCGCCCGGGCAGGTACGCGGGAGTTTTAATTTTTCCAAAGTATCATATGAATG
GAATCATGTGATATGTAGCCCATGAATCATGTATATGGGTTTTTCACTTAGTAGAGCACATTTAAG
ATTCATCATTGTTACTATGTGAATCAATAGCTGGTTCCTTTTATCTCTCCGCAGCTCCTACTGCACT
GAGAAGCACGTGTTCTCCATTTCCCTGGGGGAGACCATTGTATTGGGCAGTTTGGAACAAAACACC
ATGGACTGGGAGGCTTACACAACAGAAATTTATTTCTTGCTGTTCTAGAGGCTGGGAAGCTCAAGG
TGCTGGCTGCATATTCATTCTGAGGCCTCTTCTGATGTGCAGGCAGCTGCCTTCTGACTTGTGCTCA
CATTGGAGAGAGGGAGTCAGCTTTGGTGTCTCTTCTTGTAAGGACACTAACCCCATTCACTAGGGC
CCCACCCTCATGACCTAATCACC

| | |
|---|---|
| Sequence 1209 | cMhvSA032c02a3 |

CCCTTTCGAGCGGCCGCCCGGGCAGGTACGCGGGGGTTCGAGGTTCGTTTACGCGCCGCTTCGCCG
TGCAGGTGGTGGCGAAGCGCTCCTCCGAAAGGTTTCGGAAGCTGGTGGTAGCTCTGAAGATAACG
CTGCGTTAGGGCATACTGCGGCGGAGGATGGAACTCCGATTGAAAGCAGTTGCTGGAGTGGAGCA
CGAATTTCAACAAGCCGCATGTTGAAGTGTGAGGCGTGAAAGGGTATGTCTGATATTTGCTTTAAA
ATGCTCCAGCAAAGAAATTAAGGGATGGATGAAGCAAAAGAGCCAGGTATGGTGGCTCATGCCTC
TAATCTCAGCACTTTGGGAGGCCGAAGCAGGCAGATCACCTGAGGTCAGGAGTTTGAGACCATCC
TGACCAACATGGTGAAACTCGTCTCTACTACAAACATAAAAGAATTAGCTG

| | |
|---|---|
| Sequence 1210 | cMhvSA033a01a3 |

ATTTGGGCGGTCAACGCGGGTGGAGAGGCCCATGTGGACGTTCACGGGATCCACTTCCGCAAGGA
CCCTTTGGAAGGCCGGGTGGGCCGAAAACTTAGGACTANTGNNCNTGAAACTNCCAAATCCTNCC
GTTCCAAACCCGTGAAGGGACCNAGATCCTGTANTCAAACTTGANNCGGTACCNCCGGNGGGGTT
CCCGGGCCGTTTANCATTCNNTCCCGTGCCGCACCCGNCCCGGGNGNNCCAAAATTTTGGCAATTT
CTTTCNCTTGAAAGTAAATNATTGAAGCTTTTTTCCAAACTTNCTTGANTGNAGNCCTTTGTGNATA
ACCCCNNNTAACCTTNGGGGGCGGGNTAANNCACNACTTAAAGGGGCGNGAANTTACNANACCC
CNCNTNNNNTTGGNCCCNTTNTCTTAATTTGTNNTTTNGGAAAAAACCNGAAATGTTGGAANTCCC
TTTGATTCNAAAAAAAAAAAA

| | |
|---|---|
| Sequence 1211 | cMhvSA033c02a3 |

GGTACACTGAGCCTAGAATATCTTGTGGGGTCAAAAGGTAAGGCAGTGCTCAAAAAACAACAGTA
AAATGGCAAAAATACATAGAACCCAACTTGAAGGGCATCCTAATGTAAAATCTAGAAAAATCTGA
GCACAAAATGTATTATAGTCATGGGTTATAACCAATATAATGAGAATCCAAGAGTCCAGACTGATT
TTTAAAAAATTGCATTTTTTCAATATAAAAGAAAATATCTTCCTTATAGTAACATTTTAATTGACAA
ATGTAGAAGTAATGATGGAAGTAGAAAATCACTGTTTGGCACACACTGTAGTAATAACTGTTTCAG
ACAAGAATTATCCACGAATGCTAAAATTAGTTTGGTGAAAGTATGATGAGAAACAAGATACTTAC
ATAGGTCCAAAGCATCTCCTGACAAGATACTTATTCATTCACAGAAAAAAAAATA

| | |
|---|---|
| Sequence 1212 | cMhvSA033c08a3 |

CCCTTTCGAGCGGCCGCCCGGGCAGGTACGCGGGGACTCCTCACCCAGCATCCATAAAAGCATGC
TGCACCTTTGGCACAGCGCGACTTCCCTGGCCCTCCCCCTGCGGACCAGTGAACCTCGCCCGAGGG
CTCAATAAAGAAGATTTTTGCCCTCTTTTTCTCACCTCTCAGCCTTATTGATCCATGGTGCCCTTCC
ATTGCCTTTCATTGGTGCCGAAACCCGGGAGGGGACACCTCCTAAGCCCCCCCAGAGGCTCAGGG
GGACTCCCCTCCTGGTCGGATCAGTCCTCTCCCTCAATCAGGTCANGCTTCTCCTCCACGGCCATCT
GTCCATTTCGTCCGGTTACTTGCTGCCAGGTCGCAGTTGCTGCAGCTACTCCAGTCCAATTCGGCCG
AC

| | |
|---|---|
| Sequence 1213 | cMhvSA033h10a3 |

CCCTTTCGAGCGGCCGCCCGGGCAGGTACTTTGCTACACGGCCGGGGGCCATTGAGACTGCCATGG
AAGACTTGAAAGGTCACGTAGCTGAGACTTCTGGAGAGACCATTCAAGGCTTCTGGCTCTTGACAA
AGATAGACCACTGGAACAATGAGAAGGAGAGAATTCTACTGGTCACAGACAAGACTCTCTTGATC
TGCAAATACGACTTCATCATGCTGAGTTGTGTGCAGCTGCAGCGGATTCCTCTGAGCGCTGTCTAT
CGCATCTGCCTGGGCAAGTTCACCTTCCCTGGGATGTCCCTGGACAAGAGACAAGGAGAAGGCCT
TAGGATCTACTGGGGGAGTCCGGAGGAGCAGTCTCTTCTGTCCCGCTGGAAC

| | |
|---|---|
| Sequence 1214 | cMhvSA033h11a3 |

CCCTTTCGAGCGGCGCCCGGGCAGGTACATCGGTCCCTTGACCATTACACCCACGGTGGCCCTAAT
TGGCCTCTCTGGTTTCCAGGCAGCGGGGGAGAGAGCCGGGAAGCACTGGGGCATTGCCATGCTGT
AAGTGGAAACATCTCCCCTCATCCCACCACTGCGGGGCAGCCTTTAGGAACATTCACAGACTTCAG
GAGATAATGTTTTTCAATAATAAGAATGGTCTGACAGTTTCAACTTTATTTGCTTCGTGCTGGGGA
ATAGTTGAAGGGTTTTTGACCCAGAGTTTGGGAAGTGACATATAGTTGACGTATTACAAAGACAG
ACTTAGCAGCAATATGAAGAGGGTGGATTGTAAGTTTTTAAGCTTTGGTAGTGGGGTAAGG

| | |
|---|---|
| Sequence 1215 | cMhvSA037c07a3 |

ACTGAAAAATCTCATGTCCTGGGAAACCCCTCAGTCCTGGGCAAACTGAGACCGGTGGTTATCATA
CAAAGAGAAAACCAAATAAGACTAAAATTATGTCCAAACACTTTCATTGTGGCTAGGAACACAAG
TTGAACACCCTAATAAGGAACACAAATAATAAAAGCTTGCATTATTGAGTGCTTATATGAGGTAA
GTATTATACTATTATCTCCATTTTAAAGATAAGCAAACTGAGACATAGTAAGGGTAAATAAGTTAG
TTAGTGAAGGCACCAGAATTTAAACCCAGAAAGTTTGGTTTTAGAGCATACACTACAA

| | |
|---|---|
| Sequence 1216 | cMhvSA037e03a3 |

ACTTTGCTACACGGCCGGGGGCCATTGAGACTGCCATGGAAGACTTGAAAGGTCACGTAGCTGAG
ACTTCTGGAGAGACCATTCAAGGCTTCTGGCTCTTGACAAAGATAGACCACTGGAACAATGAGAA
GGAGAGAATTCTACTGGTCACAGACAAGACTCTCTTGATCTGCAAATACGACTTCACCATGCTGAG
TTGTGTGCAGCTGCAGCGGATTCCTCTGAGCGCTGTCTATCGCATCTGCCTGGGCAAGTTCACCTTC
CCTGGGATGTCCCTGGACAAGAGACAAGGAGAAGGCCTTAGGATCTACTGGGGGAGTCCGGAGGA
GCAGTCTCTTCTGTCCCGCTGGAACC

| | |
|---|---|
| Sequence 1217 | cMhvSA041a12a3 |

CCCTTAGCGTGGTCGCGGCCGAGGTACTTTGCTACACGGCCGGGGGCCATTGAGACTGCCATGGA
AGACTTGAAAGGTCACGTAGCTGAGACTTCTGGAGAGACCATTCAAGGCTTCTGGCTCTTGACAAA
GATAGACCACTGGAACAATGAGAAGGAGAGAATTCTACTGGTCACAGACAAGACTCTCTTGATCT
GCAAATACGACTTCATCATGCTGAGTTGTGTGCAGCTGCAGCGGATTCCTCTGAGCGCTGTCTATC
GCATCTGCCTGGGCAAGTTCACCTTCCCTGGGATGTCCCTGGACAAGAGACAAGGAGAAGGCCTT
AGGATCTACTGGGGGAGTCCGGAGGAGCAGTCTCTTCTGTCCCGCTGGAACCCATGGTCCA

| | |
|---|---|
| Sequence 1218 | cMhvSA041b01a3 |

CCCTTTCGAGCGGCCGCCCGGGCAGGTACAGTGCCCTCATCGAAGCTCCTAAAACTTCCTGAAAAA
AATGAAGCTTTAACGTCCAGCTTCCACTGCTTAAACTGAGCACAGGACGTGCACTTGGATAGTAAA
CCAGGTGTCTCCTCAAAGCCCTAATATATTCAGCATCTCTATCAAAGGCGCCTTTCATTTGACTTCT
TTGTTCTGGCAAAGACTCTCTCCTTTTAAATTTTCTTTTTTTGTCCTTATTCATTGCAAAATATTGGG
CCAGTTTACCCCTATTGGGTTCATGCAGATGGATGTTTTGCAAATGTAATTTTGTGTCCTGGACTAA
AGACTGCAACCAGCCTCGGAGTAAACGAAAATGCCCACTGCGGATATCTGACACCTTCCATTCAC
AAGCATCTACAAATGAGTCGATTTCCAA

| | |
|---|---|
| Sequence 1219 | cMhvSA041f07a3 |

ACATGGGCACCTGGCTGTGGCTCATCTACTACCATATTCTTTGTTCTTCTAGATCCTTCTTGGCTTCC
ATCTTGGCAACTCCAAAGGCATGGTGGGGAAAACAGATGCAGAGATAGATGCCTATTTCTCCTGC
AGTCTCTTTCAGCATAGCAATTAGGCAAGTTATCAATAAGAGTATATAATCTATAACTTATAGTCC
ACATAAGGCTTCACTCAATTTGAAAAATTGCCAGTTCTGTCAAATATGCTAACACTCCAATAAGGT
ATTTATGACACAGAATCTTTATTTTTCCATCAGTATGTGCTGAAGCTACAGATGTTGAAACACGAA
CTAATCTTGTGGCTGATAAATGAAT

| | |
|---|---|
| Sequence 1220 | cMhvSA041f08a3 |

ACTTTGCTACACGGCCGGGGGCCATTGAGACTGCCATGGAAGACTTGAAAGGTCACGTAGCTGAG
ACTTCTGGAGAGACCATTCAAGGCTTCTGGCTCTTGACAAAGATAGACCACTGGAACAATGAGAA
GGAGAGAATTCTACTGGTCACAGACAAGACTCTCTTGATCTGCAAATACGACTTCATCATGCTGAG
TTGTGTGCAGCTGCAGCGGATTCCTCTGAGCGCTGTCTATCGCATCTGCCTGGGCAAGTTCACCTTC
CCTGGGATGTCCCTGGACAAGAGACGAGGAGAAGGCCTTAGGATCTACTTGGGGAGTCCGGAGGA
GCAGTCTCTTCTGTCCCGCTGGAACCCA

| | |
|---|---|
| Sequence 1221 | cMhvSA041h10a3 |

GGTACAGGTCATGGTGAGCAGGTGTTCTGAGGGAAGACAAAGGAAAAGCAGAGGGAGTGTTGAC
AATTCTGAGCTTCCATATGGCAGACATTCGGGGCCTGTTGGCATGGTCCTCAGAGCAGCAACAACA
GCATCAATTGAGGTTCATTAAAATGCAGAATCGCAGGTTCATGTGGACCTACTGAATCAGAACCTG
CATTCTAACAACAGTTTTCAGTGGTTCTTCCGCACATTAAAGTTTGAAAAGCACTGGTCTGGAGGA
GGAGGCTCTACAAAAGGGTTGGGTATTGAGGAGCCGAAAAGACAACCTGGAACTGAGATTCCCAG
GGATGACCTGAAAACAAGCATTTCAAAAGCTCAGAAA

| | |
|---|---|
| Sequence 1222 | cMhvSA049h12a1 |

CCCTTAGCGGCCGCCCGGGCAGGTACAGTATCCTATATTATTCCTATTTTAAGATTTAAAGAAAAC
CCTGAGGTTTAGATAAGCAAATTGCTCAAAGTCACGCAATGCCATAGTAGTGTTGGAGCTATGATT
TTCCAGAATCTAAGCTCTTAGTCCTGGGAAGTGCCTAGTGCCCAAAGAAGAAGACTGGAATAAAA
TAAGGCTGAATGGTGTGTAAGAACCAAATAACAAAAGCCTTGCAGACAATTTTAAAGGCTGTGAA
TATTAGTCTAAGAACAATAACAAGCAAAAAAAAAAAAAAAAAAAGTTTTAACTGGAGATAGTAA
CATGTGTTTTCTTTTCTCTTCTTTTCTTT

| | |
|---|---|
| Sequence 1223 | cMhvSA054f03a1 |

NTGTNATGGATATCTNCAGANGGGGCCCTTANCNTGATCCCNNCCCANGTACACNGCAGGTATCT
GGCTCCACCACACTNANGAACCNGNAGGAGGCANGGAGTGGATANTGTGTCAAGGATGACTGAN
CCCTNCTTCTGTGTAAAACAAGTTACACCTANATTCANAATANATGCTGNNGCAACATAAAATTAT
AAAAATTCACTGTAATTCACATCTTGGTGCCTGGGCACCANTTTTTAAATGT

| | |
|---|---|
| Sequence 1224 | cMhvSA054f08a1 |

CGGCNTTTGGGCCCAACCAGCCCGCTCGAGCGGCCGCCAGNGNGATGGTTTTTGCAGAGGGGNAA
ACNNCGCNCCCCCGGCCNANGTACNTAGAGCCTGAGTTGCTCCACAGGAATCCAGGAACTGNGCA
CANGAAAAGGANCTCAGCTGGTGGNGTGGGAAGATGGAAACCAACTTCTCC

| | |
|---|---|
| Sequence 1225 | cMhvSA057a05a1 |

CCCTTTCGAGCGGCCGCCCGGGCAGGTACAAATATTTTAAATATGGAAATCCTAATGCAGGGGGT
GGGCTGAGAGAGATTTTATAGAATATATGTATGTATGTCCAAAACAGAAGATACGGAATAAAAAG
CATGAAAGAAAGAAGAGGTTCCATAGCAAGGTATCAGCAGTTCCTCAGGGATGAGGATGGCGGA
GGCATCAAGGAATCTCAAGATGCTACCAAAATAGGAGCGGAAACATGGAAAGATGGAAGCACAT
GTATAATTCAAGTCTGTTCAGCAACTTGTGTGCCTCCAGCCTAAAAGTAAACCACAGTCATGTTCT
AAAGGTTCCGATTCATACACATGTCTGCTTGTTCTTCAGTTTTGGTTTTGCTACTGGGCTTTGATTCT
TTAATCCCCACCTGCTGAATGA

| | |
|---|---|
| Sequence 1226 | cMhvSA057a12a1 |

CCCTTAGCGTGGTCGCGGCCGAGGTACGCGGGAATTGAATGTCAACTTTAGCTGTGACTTTTCTGG
CAGCTAGAATAAAAGTAAGATCGTTGTCTGATAGAACTGAATGTCTCAGTTTATTAGAACAACAA
AATACTGTAATCTTTCTCAAAACCTACATGGAACAAACTGGAACAAGTATTTCATGAAAACCAAAT
GAAAAATAAGTAAATAAATGATTTCATCACCACTGTCACCAAAAACAAATGAATTTTTTGGATAG
GAAAACATGGCTAAGTTGGTAATTGACTGAGACATTGGCCTGGTGTGTTATCTGTGGTTGTATTTT
ATTAAACTTATATTTACAGAAATGGAAAAAAACTAACTTTTCATACAGNTTGGTGTATTCATAGCA
AAATATGAATAGAAATCACCTCTGGAATCTTGATGA

| | |
|---|---|
| Sequence 1227 | cMhvSA057f05a1 |

CCCTTTCGAGCGGCCGCCCGGGCAGGTACTGAAAAATCTCATGTCCTGGGAAACCCCTCAGTCCTG
GGCAAACTGAGACCGGTGGTTATCATACAAAGAGAAAACCAAATAAGACTAAAATTATGTCCAAA
CACTTTCATTGTGGCTAGGAACACAAGTTGAACACCCTAATAAGGAACACGAATAATAAAAGCTT
GCATTATTGAGTGCTTATATGAGGTAAGTATTATACTATTATCTCCATTTTAAAGATAAGCAAACT
GAGACATAGTAAGGGTAAATAAGTTAGTTAGTGAAGGCACCAGAATTTAAACCCAGAAAGTTTGG
TTTTAGAGCATACACTACAATCAGCACTGTATGGAAAGATATCTAAGAGCAGAGACAGGCAGAGA
TGGGAGCA

| | |
|---|---|
| Sequence 1228 | cMhvSA057g09a1 |

CCCTTAGCGTGGTCGCGGCCGAGGTACTTTACTCACCCTTCCTCTGACAGAAAAGGATGAAGTCAA
GGGCCTGGTAGAGGCACCACTAAGAAAGGCATCTGAAAGGACCAAAGAGAGTGACCAGCAAGCA
TTTTTTGCAAGGCTGAGGAGCTGACAGCTTCCATGAAAGGCTGGACCACCCAGTGGTGAAAAGCA
TCATCTGGGTTACCTTGTGCTGCCATAAAACACACCACAGACTTGGTGACTTAAACCACAGATATT
TATCTTCTCACAATCCTGGAGGCTGGAAGTCTGCAATCACGGTGCCAGCATGGTCAGGTTCTGGTG
AGGGCCTCTTTCCTTCTCACTGTGTGCTCTTTCTTGTGCATGGAGAGAGAGAGCATGAACAAGCCC
TCTACTGTCCCTCTTAGAAGGGCACTAATCCCATAATAA

| | |
|---|---|
| Sequence 1229 | cMhvSA058d09a1 |

CCCTTTCGAGCGGCCGCCCGGGCAGGTACTTTGCTACACGGCCGGGGGCCATTGAGACTGCCATGG
AAGACTTGAAAGGTCACGTAGCTGAGACTTCTGGAGAGACCATTCAAGGCTTCTGGCNCTTGACA
AAGATAGACCACTGGAACAATGAGAAGGAGAGAATTCTACTGGTCACAGACAAGACTCTCTTGAT
CTGCAAATACGACTTCATCATGCTGAGTTGTGTGCAGCTGCAGCGGATTCCTCTGAGCGCTGTCTA
TCGNATCTGCTGGGCAAAGTTCACCTTCCCTGGGATGTCCCTGGACAAGAGACAAGGAGAAGGCC
TTAGGATCTACTTGGGGAGTCCGGAGGAGCAGTCTCTTCTGTCCCGCTGGAACCCATGGTCCACTG
AAGTTCCTTATG

| | |
|---|---|
| Sequence 1230 | cMhvSA058g06a1 |

CCCTTTCGAGCGGCCGCCCGGGCAGGTACTTTGCTACACGGCCGGGGGCCATTGAGACTGCCATGG
AAGACTTGAAAGGTCACGTAGCTGAGACTTCTGGAGAGACCATTCAAGGCTTCTGGCTCTTGACAA
AGATAGACCACTGGAACAATGAGAAGGAGAGAATTCTACTGGTCACAGACAAGACTCTCTTGATC
TGCAAATACGACTTCATCATGCTGAGTTGTGTGCAGCTGCAGCGGATTCCTCTGAGCGCTGTCTAT
CGCATCTGTCTGGGCAAGTTCACCTTCCCTGGGATGTCCCTGGACAAGAGACAAGGAGAAGGCCTT
AGGATCTACTTGGGGAGTCCGGAGGAGCAGTCTCTTCTGTCCCGCTGGAACCCATGGTCCACTGAA
GTTCCTTA

| | |
|---|---|
| Sequence 1231 | cMhvSA059f04a1 |

CCCTTAGCGTGGTCGCGGCCGAGGTACGCGGGGGCAGTTCTTGAGTTCCACATGCAGAGCAGATG
CGACAGCTAGAAGTGAGTGGGGCCCAGACCCTGGCCCAGGAAGATCCACTAAAGGAGGCCATCCT
TCCGCCTTCTTCTGCAGGAGTCAGGATGGAAAGGCAGATGTAAAGTCCCTCATGGCGAAATATAA
CACGGGGGGCAACCCGACAGAGGATGTCTCAGTCAATAGCCGACCCTTCAGAGTCACAGGGCCAA
ACTCATCTTCAGGAATACAAGCAAGAAAGAACTTATTCAACAACCAAGGAAATGCCAGCCCTCCT
GCAGGACCCAGCAATGTAC

| | |
|---|---|
| Sequence 1232 | cMhvSA062f11a1 |

CCCTTAGCGTGGTCGCGGCCGAGGTACTGTTGCAGTGAGCTCAAGTGTTGGGTGTATCAGCTCAAA
ACACCATGTGATGCCAATCATCTCCACAGGAGCAATTTGTTTACCTTTTTTTCTGATGCTTTACTAA
CTTCATCTTTTAGATTTAAATCATTAGTAGATCCTAGAGGAGCCAGTTTCAGAAAATATAGATTCT
AGTTCAGCACCACCCGTAGTTGTGCATTGAAATAATTATCATTATGATTATGTATCAGAGCTTCTG
GTTTTCTCATTCTTTATTCATTTATTCAACAACCACGTGACAAACACTGGAATTACAGGATGAAGAT
GAGATAATCCGCTCCTTGGCAGTGTTATACTATTATATAACCTGAAAAAACAAACAGGTAATTTTC
ACACAAAGTAATA

| | |
|---|---|
| Sequence 1233 | cMhvSA057c03a1 |

CCCTTTCGAGCGGCCGCCCGGGCAGGTACCATGTGCCTGAGATGGAGGTGTTTGTGGTTGGGCAGG
CTGGCTTTGCTAATTTTAAATCCACCAAAATATATCATTTTGGCATTGACAGGTGTATTAGTCTGTT
CTCAGGCTCCTATAAGGACATACCTGAGACTGGGTGATTTATAAAGAAAAGAGGTTTAACTGACTC
ACAGTTCCGCATGGCTGGGGAGGCCTCAGCAAATTTACAATCATGGTGGAAGGGGAAGCAAACAC
ATCCTTCTTCACATGATGGCAGCAAAAGGAAGTGCTGAGAAAAAGGGGAAAAGCCCCTTAGAAAA
CCATCAGATCCCATGAGAACTCACTATGATGAGAACAGCATGGAGGTAACCACCCATGATTCCATT
ACCTGCCACCGGGTGCGTCCCACAACATGT

| | |
|---|---|
| Sequence 1234 | cMhvSA009d11a2 |

GGTACTGGGTGGGTGAGTGGGCTCAAGGCCTCCTGAGTAGCCTGGGTGGCGTGGGCAATGATGGT
AACAGAGGCAATGCAAAGCTTGTCTCCTTCTTGAGCTCTGTGCTCTTGAGTCGGCAGATGTTGTAA
GGGACTGTGTAGATCAACCTTTAGGACAGGAGGTAGCACCTAAAAGTGAGAACCAGCTGTGGTGG
TGGCAATAGAGTTTATGCTTGACCTTTGTTAATCGGGAGAAGTTCTTGGGCATTTCAGATGATGGG
TAGGGCCATGGAACTCTCAGTAGTCCTGGTCCCATGATCTGCCTCTGAAACAGGAGGGGTGGGAT
GTGGTAGTGGGATCCACTTTGTTCTCGTGCT

| | |
|---|---|
| Sequence 1235 | cMhvSA041g12a3 |

CCCTTTCGAGCGGCCGCCCGGGCAGGTACGCGGGGACACTTTGCTGCCGAAACGAAGCCAGACAA
CAGATTTCCATCAGCAGGATGTGGGGGCTCAAGGTTCTGCTGCTACCTGTGGTGAGCTTTGCTCTG
TACCTCGGCCGCGACCACGCTAAGGG

| | |
|---|---|
| Sequence 1236 | cMhvSA003e12a3 |

CCCTTTCGAGCGGCCGCCCGGGCAGGTACACCTTGTTGGGAGAGATGGGGGCAGCCCAAGAAAGC
TCCTCAGCGGACTGAAGAGGGAGTAAGATGGGCTGAGGGGAGCTTGCAGTTCATGCTGCATTAGG
AAGAGGGAAGCTCTTCAGTCCAAGTGCNGCCTGCAGGGGTGGGAAAAGCAACCAACACCGGACA
CCCGTTCCCACCCTTNAACCCCCCCACTGGGCACAGGGGTCNCCACCAAATTCTGGGGTCAAAANG
AAAATTAGGGCGGGGGGGCCCCCTTTGTGGGGTCCATTCCAAAAAGNCGGATNCCCAATGGGTTC
TTTTGGAGGGGCTTGGAGGGGANTTCANTGTTGCCAAGGGCCCCATTTAGNGGNTGGAAAAAAAT
TGGAAANGAAGNCANTTGNAAACCNAGNGGGNAGGGGTGGAAGNCAAGCCCCCCCCATTCCCAA
NGATTGNCCCCGGGGGGGGGANNTAAAAGGAAAGGCTTGNGGCCANCCAAGTTCNGGCCTTGGG
CCGGTTANGGGGAAAAAAAACTTGGCCTTCCCCCCCCATTTTACCCGNTTTGAAAAAGGCCCTTGG
GGATTCTTGGGGAAAGTNTCCCTTGGAAAGCCCATNNCANTTTTTGCCNCANGGGGAAAGAAGGG
GGCCTTGCCGTTTGNCCGGGGCCCCACNNAGGGGAAGNACTTANCCCCTTTTC

| | |
|---|---|
| Sequence 1237 | cMhvSA002c10a3 |

CCTTAGCGTGGTCGCGGCCCGAGGTACTGATAGTCTGTCTCGTTTACGAAGCCCATCTGTTTTGGA
AGTTAGAGAAAAGGGCTATGAACGATTAAAAGAAGAACTCNCAAAAGCTCAGAGGGAACTGAAG
TTAAAAGATGAAGAATGTGAGAGGCTTTCAAAAGTGCGAGATCAACTTGGACAGGAATTGGAAGA
ACTCACAGCTAGTCTATTTGAGGAAGCTCATAAAATGGTGAGAGAAGCAAATATCAAGCAGGCAA
CAGCAGAAAAACAGCTAAAAGAAGCACAAGGAAAAATTGATGTACCTGCCCGGGCGGCCGCTCG
AAAGGG

| | |
|---|---|
| Sequence 1238 | cMhvSA054a12a1 |

NGGGCCCTTAGCGTGGTCGCGGCCGAGGTACTTTTTTTTTTTTTTTTTTTTTTTTTTTTTTTTCTTTTT
TTTTTTTTTTTTTTTTTTCNANCCAACAATGTNTTTTNTTATGTNTNCGGGTTTNAAAATTNTTTNTT
NAATNTCTCCATNCCCAGNCAAAGGGANGNGTGTTNCTTAACATACTGNAAATTGCCTAACTTAAT
CATTNCCTAAAAAAAAAAAAATTN

| | |
|---|---|
| Sequence 1239 | cMhvSA054e05a1 |

NGGGGCCCTTAGCGTGGTCGCGGCCGAGGTACTAGGATTACAGGCGTGAAGCAGCATGCCACGCC
TATAGTGATATCTTTAAGTAAGCCTCTCCTATCTTTTTTGAGCAGTTTTTCAAAGCAACAGGCACCT
TATTAAATTAGAAAGTTGATGTGCTTGGCCTAATGCCTACTAATGAGGTAAAGAACTAAAGAACCT
CTGTGATTTCAATGAAGTCCCTTCAGATGTTATGGGCTACTTGTTACTGACAAGTATGGTAGGAAC
TGTAGGTCAAGCTGTCATAGGCAAATAGATCTTGCTGAAGAGGAAGAATTATTGGCTAA

| | |
|---|---|
| Sequence 1240 | cMhvSA033e07a3 |

ACTTTTTTTTTTTTTTTTTTTTTTTNNNNGAAAAAAAAAAANTTTTTTTNGGGGGCCNNNTNTNGGG
GGGGGGGNAAAAAAAAAAAAGNTTTTNNTNNTGGGGNNNAAAANCTTAAAANCCNNGGGGGGG
NNGNAAAANGNAAAAATTTTNTTTTTNNAACCAAAGGGCNANNAAAGGGCCNGGGGCNTAANNG
GGGAAAAGGGGCCCCNAAAANCCCTNGGGGGGNGGGGGGGGNNGCCNAGGGNAAANGGTTNTT
NAAAANGNCCTTTTTTTCCNAGGGGCANGGNTNTTTNCNACCNNGGNCNTNNCNAAAANNAAGGG
NTTNGNCCNNAANCNTTTTTTTTTTTTTTTNGAANCCNTNCNAAAAANTTTTTT

| | |
|---|---|
| Sequence 1241 | cMhvSA059b05a1 |

CCCTTTCGAGCGGCCGCCCGGGCAGGTACTTTAATTAGAGACGAGCCAGTGCAGAATAGCTGGAC
AGGCAGTGCGTCCACCCAGCGAGCAGACTGCCCAGGGGGGGCAGTCTCCACCTCACTGATGCAAC
TGGTGAAGGGACAGACAGGGGCGTGGATACATTTCTTCCTTCCCCAAAACAAAATGGGAGGATGC
GTGTGGGTTGGTGGGTTACAGAGAAAGATTCAAACATCATTCTGGCCTGATCAGTATTCTGGCAGT
TTACCATTATACATACAGAAAAAGAACAGAAAGTGTGTTAAAGAATCCAAGTTTTAAGGGGAACA
GAAAACAAAGTCATCTGCACTATGGAAGCCTATTTTTTTCTTTCTTTGTTTCCCCTCCTTTTTCTNTC
TCCTCCTCCTTTTTTCTT

| | |
|---|---|
| Sequence 1242 | cMhvSA002f05a3 |

AGTCGACCCCGCGTCCGCCAGATTTGATAAAACTGCATGATTCCTTAGGAGGAAGTGGAACCAGA
TGGACAAATAGAGCCCTCGTGTGATTGTTTCCTGCAGGAACACCAGATTGAACAACTATTCATGCA
AGAAAACACCTTCGTAGGAGCCAAAACAATTAGAGTGATCACAGTGCCTGATCTGAACATAATAT
TAAGGAGAGAGGAATTGAAGAGGATAGGAAAGACGGTCTTGCATTGCATGCACCATCCCTCCCTC
AAACCCAAGCAGCAGAGCATGGAGAGAAAATCTGTGCTTAAGGGAGAGAGAGCAAAGCAAGAGT
GGGACTCGGTACTGTCGTATCACAGTGGAACATAGCAAAGGGCAGAATTCTGCTGGCACCCAGGA
CAGGAGCCTTCAGACCAGCCCTGGCCCACAGGGAAATTCTGTGCCCCATTGGGAGGAACCCAAGT
CACAGNCAGCTTCACCACTGACTAACTGAAGTGGCCTGGGACCCANAATAAATTTGAGTAGCAGT
CATGCCACAAGGACCACAGTCCTAGGGCAAGCCCTGCTGCTTTGCTGATCTCAAAAGCACTGGACT
TTGAGTGCAACTCAATGCAACACCAGAGCCCAAGAGACTGCCTGCATCACCTNCTCCAATTCANGC
AGTACAGCTNCAGGAGAGACTCCTTCCACTTGAGGGAAA

| | |
|---|---|
| Sequence 1243 | cMhvSA032e08a3 |

GGTACTTTTTTTTTTTTTTTTTTTTTTTTTAAATTTTTTTTTTTTTTTTTTTTTTTTTTTTTTTTTTTTTTT
TTTTTTTTTTTTTTTTTTTTTTNGGGGGGGGGGGGNNTTTTTNNNNAAAAAAAAAAAAAAAAAANN
NNNNNGGGGGNNNCCCCNNCCANTTTNANNNGGGGGGGGGGGGNCCCCNNNTTNNNANTNTTTT
TTTTAAAAANANCNNNCNTNNTTTTNNGGNNNNNNCNNNNTTNNAAAAAAAANGCCCCCCCCCCC
NNANNAAANANANGNTGNGNAANANCCCCCCNCNGNAAAAAAAACCCCNNTTTTTTAAAANANG
GGGGGGGGGNGNTTNNCCCNNCTCCNNGANGANNNNGGCCNNCCCCCCCNAAAAA

| | |
|---|---|
| Sequence 1244 | cMhvSA032e04a3 |

CCCTTAGCGTGGTCGCGGCCGAGGTACATTTCTGTTAAAAAGAAGGTTGTCTTTCCAGCCTTATGTT
TTGTAGTTTAATTTGTTCACATTCATTATAATCCATTATTTAATACATTTTTCTTCCATTTGATCATA
TTACTTGCTGATAGGAAGGACTGAGTTCATTTTCAGCGTGTCTGGCTTTTCCATTTCTGTGGCCTGG
GAAGGTGGGTGGCTACATCATCATCCATGGTCTCTGAAATATCCTGTGTTACCAAGGCCTGCTTGT
TCCACCAAACTGCTCCATAGGCAGTTGTGACACCCAGAAAGATGCTGATATGGTTTGGCTGTGTCC
CCACCCAAATCTCATCTTGAATTGTAGTTCCCATAATCCCCAGGTGTCTGGGAGGGGCCCAGTGGG
AGGTAATTGAGACATGGGGGCGGGTTTT

| | |
|---|---|
| Sequence 1245 | cMhvSA002h12a3 |

GCACTGTGACAAGCTGCACGCTCTAGAGTCGACCCAGCAATCTCCCTGCTGCTCCGTCGTCCGCCA
GGACGTGAAGCATTCCCGGGCGACGTTTTCTACCTCCACTCTCGTCTGCTGGAGCGTGCTGCACGT
GTTAACGCCGAATACGTTGAAGCCTTCACCAAAGGTGAAGTGAAAGGGAAAACCGGTTCTCTGAC
CGCACTGCCGATTATCGAAACTCAGGCGGGTGACGTTTCTGCGTTCGTTCCGACCAACGTAATCTC
CATTACCGATGGTCAGATCTTCCTGGAAACCAACCTGTTCAACGCCGGTATTCGTCCTGCGGTTAA
CCCGGGTATTTCCGTATCCCGTGTTGGTGGTGCAGCACAGACCAAGATCATGGAAAAAA

| | |
|---|---|
| Sequence 1246 | cMhvSA049d12a1 |

CCCTTTCGAGCGGCCGCCCGGGCAGGTACTTTTTTTTTTTTTTTTTTTTTTTNATTTTTTTTTTTTTTTT
TTTTTTTTTTTTTTTTTTTTTTTTTTTTTTTTTTTTTTTTTTTTTTTTTTTTTTTTTNNAANNGAAACCNN
TTTNANNAAAAAAAAAACTNCCCNAAANANNTTTAAACNTTANANCCAANAAAAAAACCCANCA
TTTAAAAATTTTTNCNTTTNGCCCCCNAAAAAAGGNAAAAAAAAAGGGGNCAAAGGNNCCCCATT
TTT

| | |
|---|---|
| Sequence 1247 | cMhvSA032c08a3 |

ACAGTAAGGAGCAGACAAGATGGTTCTGGCCAAGTGGAAAGCCCATTTGCATAATAAGATTAGGG
TGGGGCGACCAGCCTTCCCACACACAATGTAAATGTCACACCTGATCCAATCAATCTGTGGGCCCT
ACATAAATCAGACAGTGCCTTCTCAAGCTTGCCTGTAGAATCCAGTGCACTCTGCCACCAGCAGGT
CTTTCCTTTTCAGATACCTCTCTCTGGCAAGAGACAGACAGAGACGGCTGCTCTCCTCTCCCCTTTC
TTCTGCTTATTAAACTTTCCGCTCCTTAACCCATTCCATGTGTGCGTGTCCATGTTGTTAATCTTCTC
AGCACAAAATGACCAACCCCAGGTATTTACCCCAGACAATGATGCCACTTCACTTGTAGGTTCCTC
CAATCCACTTTTCTCTTCATGAAATTAGTGAGAACAAAACCACCCTTTTCT

| | |
|---|---|
| Sequence 1248 | cMhvSA062d05a1 |

CCCTTTCGAGCGGCCGCCCGGGCAGGTACATCTCCTGGCCCTCAGGTGTCATGGAATTTAGGTAGT
AGCAGCCTGAGGCTGGGGTCCTGGGCACCTGACTGAACATCTCGGCAGATTTCCTATTGCCACCTC
AGTCTGCCTGTGGCTGTTGCCGTCTGTCTCCAGTCTCAGTCAAAGAGCAAGGCACCCAGCCCAGGA
CAGCTCAACAGACCCAGCGATTTTTAAAAAGAAAGAGGAGTGCCAAAGCCACAACTCANAATTCC
AACCCCCGGGCCCTCACGTGACCTCGGGAACCAATGAGAGGAAGAGAGGAAAATGGGAACGTTT
GCAGTCAGCCCTAAGCCCCGACCAGAGGCAGTTCCAGCCGCCAGGGTCCCTCACACAACGCTGAA
AGCAAAATACACGTATTTGAC

| | |
|---|---|
| Sequence 1249 | cMhvSA031g04a4 |

CCCTTTCGAGCGGCCGCCCGGGCAGGTACTCTAGCCTGGGTGACAGAACGAGACTCTGTCTCCAAA
AACAAACAAACAAAACACAGAAATACTGGGAATAAAAGTATTTTTGAAACATGTAGATCCTCTTT
TATTAAGAAAGAGGCAGACATCTCACACTTAGGAAAATCTCAACCCTTAAAGAGAGAAATGAAAT
AGAAATTTTACAAATCAAAACAAAAGTAAAAAAAATCAAAAATAACAGATTTTTATCAAAGAAAT
TAAAATTTCAGATTTAACGTGGAAAATATCTGAAAAATGTTGTGATTATGAATAAGCCTTATGACA
TTTCTGCATCACTTCCTGACTTATAGACCTATTTCTCTAAATTGATATTCATTCTACACCAATGAAC
CACTA

| | |
|---|---|
| Sequence 1250 | cMhvSA031e12a4 |

CCCTTAGCGTGGTCGCGGCCGAGGTACCTGGGTGATGGCCATACTGCGTGCCGCCATAGCTCAAGC
CATGTGCCTGAGGCTGTGCATGAGGGAGAGAAAGAATGTCCACTCCCAAAAGAACTGATTCAGGC
ATGAACAGAACCATTGCACATCCTCAGGAGGTTCTAGCAAACCTGCACATCCATGTCTGCACTTAG
ACAACATAAACAGAGTGAGAATGCCTTCCCAGAGCACAGCAGAAGTTCAACTGGCAACGACCAGG
AGAATTTTCAGCTCATCCTTTACAGAAAATGTAACTTCCATGGAGAGGACAGGAGAATCAGACAA
AGACAAGCGGAGACTCTTTCTTTTCTGCACGTGCTGGTACCTGCCCGGGCGGCCGCTCGAAAGGG

| | |
|---|---|
| Sequence 1251 | cMhvSA031a09a4 |

ACACATGTCCAAGGTCAGGTCCTGGGTGGTAAAGGTAAATACAAATTGGAAGGGCACTGTGTGAG
CCAAAATGAGTCAGATTAGTCATGATTCATTTCCAGTTTGGGTTTTGGGTGGTCTTGGAGAATGTT
GTAAGCACTGCTTCATTGATAGGTTGATTGAGCCAGACTTTACTCAGCAGCCTGGAAAAGGAGAG
ATGGGCTCTGGGTTCTACCTTTGCTCACTGGTAAGTTGCTAAGATTTCAGCTTTGCCCTCAAACCCT
GAAGTAGTCCTTCATTCACACAGTGGGATCACTCGAAAATGTCAGATGGGGAAGTCCATAGGTTGT
TACTTTAAAGAAAATAGAAAAAATGCTGGAAAAGGTTTCTTCAATTTTAATACCCA

| | |
|---|---|
| Sequence 1252 | cMhvSA002a01a3 |

ACTTTTTTTTTTTTTTTTTTTTTTTTTTTTTTTTTTTNTTTTTTTTTTTTTTTTTTNAAAAAAAANTTTTT
TNNGGGNANNNNNNNTTTTTTTTTTTTTTTTTTTNNAAAAGGGGGGGNNAAAAAAAAAAAAAAAN
AAANGGGGGNNAANNNNAAANGNTTTTTTTTTNNNNAAAAAAANNGNNTTTTTTTNAAAAANTTT
TTTTAAAANNNNAAAANNTAAAAANNTTTTTTNNNNNGAAAAAAAANTTTTTTTTTTTTTNGGGGG
GGGAAAAAAANANNANTTTTTTTTTTTNNNNNNNAAAAAAAAANNNTNNAAAAANGGGGTTTTTT
TTTAAA

| | |
|---|---|
| Sequence 1253 | cMhvSA057d07a1 |

CCCTTTCGAGCGGCCGCCCGGGCAGGTACGCGGGGGCCGAGAGTCTGTGCGAAGGTCCGTGGACA
GACTGCTTTGCCTGTTGTTGCTCTTCGGAGGCGGCGATCCCCGAAGGCGAGCTGAAATACGGCTGC
AGGCTACAATTTGCAGCCGACCATTATGGATGACAAGGAGCCGAAGAGGTGGCCCACCCTCAGGG
ACCGCTTGTGCTCGGATGGCTTCTTATTTCCCCAATACCCCATTAAACCGTATCATCTGAAGGGGAT
CCACAGAGCTGTCTTCTATCGTGATCTGGAGGAACTGAAGTTCGTTCTGCTCACGCGTTATGACAT
CAATAAGAGAGACAGGAAGGAAAGGACCGCCCTACATTTGGCCTGTGCCACTGGCCAACCGGAAA
TGGTACCTCGGCCGCGACCACGCTAAGGGCGAAT

| | |
|---|---|
| Sequence 1254 | cMhvSA058h03a1 |

CCCTTTCGAGCGGCCGCCCGGGCAGGTACTTTATTTTTTTTTTTTTTTTTTTNNATTTTTTTTTTTTTT
TTTTTTTTTTTTTTTTTTTTTTTTTTTTTTTTTTTTTTNTATTTTTTTTTTTTTTTTTTANGGGGNTTNAA
NNNAAAAANTTANTTTNGNGTTTTNAAAAAAGGGGNAANTTTTNAAAAANNGNGGNNAAAGNTN
TNAAAAAAAAAATAAAATTTTNNGGGGGGGGGGGNGNNNGTTTANAAAAAANTTTTNTNAAAAA
NNTNTNAAAAAAATTTTTTTTTTTTTTTTNCCNAAANNNTAAAAATAATATTTTTNAAAAAAAAAN
NNNGNNNANNCTNTTNTTNANAAAAAAAAAAAAAAAAAANNNNGAAAAAAAATATTTT

| | |
|---|---|
| Sequence 1255 | cMhvSA033a02a3 |

GGTACCATTGGTGGCCAATTGATTTNATGGGGAGGGAAGGNAACGCCTGGCTCGGAGCAGTAGCC
TCTGAGGTGTCCCTGGCCAGTGTCCTTCCACCTGTCCANANGCATNGGGGAACATTTTCACCAACC
TNTTCAAGGGCCTTTTTGGCAAAAAAGAAATGCGCATCCTCATGGTGGGCCTGGATGCTGCAGGG
AANACCACGATCCTCTACAAGCTTAAGCTGGGTGAGATCGTGACCACCATTCCCACCATAGGCTTC
AAC

| | |
|---|---|
| Sequence 1256 | cMhvSA059h05a1 |

CCCTTTCGAGCGGCCGCCCGGGCAGGTACAGCTGGTCCAGGATAGCCTGCGAGTCCTCCTACTGCT
ACTCCAGACTTGACATCATATGAATCATACTGGGGAGAATAGTTCTGAGGACCAGTAGGGCATGA
TTCACAGATTCCAGGGGGGCCAGGAGAACCAGGGGACCCTGGTTGTCCTGGAATACCAGGGTCAC
CATTTCTCCCAGGAATACCAGGAGGGCCCTAAAAAAGAGATAAAAATAAATTAAATAGTGAAAAA
TCCTGGTGATTCACAATCATTATCAGATTGTTGTTTCTCTACTTTATAATATTAGGAAACAATATAA
GTAATATATTTTCTTTATAACACATACTTTTTAATCAAAATCTTGTGAATAATTTAAGTATAATGTA
TTCCTTTGT

| | |
|---|---|
| Sequence 1257 | cMhvSA010h06a3 |

CCCTTTCGAGCGGCCGCCCGGGCAGGTACGCGGGGAGTGCCGCCGGGACTCTTGGCGGGTGAAGG
TGTGTGTCAGCTTTTGCGTCACTCGAGCCCTGGGCGCTGCTTGCTAAAGAGCCGAGCACGCGGGTC
TGTCATCATGTCGCGTTACGGGCGGTACCTCGGCCGCGACCACGCTAAGGGCGAATTCCAGCACAC
T

| | |
|---|---|
| Sequence 1258 | cMhvSA003c05a3 |

ACTTTTTTTTTTTTTTTTTTTTTTTTTTTTTTTTTTTTTTTTTTTTTTTTTTTTTTTTTTTTTTTTTTTTTTT
TTTTTTTNNTTTAAAANTTNNTTNNNANAAAAAATTNTNNANNTNTNTNAAAANAAGAAAGCTTTT
TTTAAAAAAAAAAAAAAAAATTTANCCNGNCTCACAAATGTAAGTANANAAATNTNANGNNTAA
AAAAAAANTNNCCNCTCCTTNNTNTTTAAGGGGNAAAANNCCTTTTNCNTNNGNGNGNAAAAAAA
AAAATTNNNTTTTTNNNGNANACTGGCCGGCNATTTCTAANGGAANNTNGNTNTATNCTNAAAAA
AAATAGNTATTNNNGGGAANAAAAAAAANNAAANAAAATTNNNNNNGGGAACNANAAAAAAAA
AAAAAAAANNNNCCCNCCNCNNNNNAAAAANANTTATNNNNNCNNANNANANNNANGANAAAA
NATTTNNNTTNNNAAAAAAAAAAAAAAAAAAANNTTNGGGGGGGGNNGNNANAAAAAAAAANA
AA

| | |
|---|---|
| Sequence 1259 | cMhvSA018d11a3 |

CCCTTTCGAGCGGCCGCCCGGGCAGGTACCCCTCACCCTCCCTCCTCCAATCTCCCCATGGCAAAA
AAATGCACCTTTTTTTTTTTTTTTTTTTGNAANGGGNTTTTTNTTTNNTNCCCNAANNGGGNNGNCG
GGGNCCNANTTTANNTTANNNGAAGCCCCNCCNNNNGGGNTNNNCCCNTTTNNCNGNCNNAACCC
NCNGNNGNGGGGGGNANANNGGNCCCCCCCNCCNNNCCNGGGNAATTTTTTNNNTTTTTNNNAAA
AANGGGGTTTNAANGGNCNTNCCNNGNNGGGTTTTNTTNCCCCNCCNTANNANTTNNCCCCCTTG
GNCNNCNAAAGGGGNGGGNNTAAAGGGCTNNACCCCCNNCCCCNACCAATGGCCCTTTTTTTTTT
TTTTNAAAAAAAAA

| | |
|---|---|
| Sequence 1260 | cMhvSA031d07a4 |

GGTACTTTTTTTTTTTTTTTTTTTTTTTTTTTTTTTTTTTTTTTTTTTTTTTTTTTTTTTTTTTTTTTTTTTT
TTTTTTTTTNNNNNNNNNNAAANNNTTTTNNAAAAAAAAAAAAAAAAAAANNNNTTTTTNNNATN
GCANNGGGGGGGNNNNANAAAANTNTTTNNNNTTNAANNNCNNNNNNAAAAAAAAAAAAAANA
GGGGGGNGGAANNNTNTTNCTNANAAAAANANCTTTTTTTTTTNGCNNNAAAAAANAANACNCCN
CCCNCCNCTNNNGGGGGGGGGGGGGGNGAAANACCCNNGGGGGGAAAATTT

| | |
|---|---|
| Sequence 1261 | cMhvSA031e07a4 |

CCCTTTCGAGCGGNCGCCCGGGCAGGTACTTTTTTTTTTTTTTTTTTTTTTTTTTTTTTTTTTTTTTTTT
TTTTTTTTTTTTTTTTTTTTTTTTTTNTAANAAAAAAAANANNTTTTTTTTTTTNCGCNGAGNNNNNN
TNAAAAAAAAAAAAAAANNNNTTTTTTNNGGGGGGGGNNNNNNNAAAAAAAANNTTTTTTTTTTT
NGGGGGGGGNACNAAAAAAANGGGNGGANNAAAANNNTTTTTTNTCTNGNNANANNNAANNCN
NTAAAAAAAAAAATNNNNCNNCACTTTTTTGGGNGANTGTAANGGGGGGGNGGGGGGG

| | |
|---|---|
| Sequence 1262 | cMhvSA037g01a3 |

CCCTTAGCGTGGTCGCGGCCGAGGTACTTTTTTTTTTTTTTTTTTTTTTTTTTTGGGGTTTTTTTTTTT
TTTTTTTTTTTTTTTTTTTTTTTTTTTTTTTTTTTAAAAAAANCCCCNNNNTTTTTTTNTGGGNNNAAA
AAAAAAANANNCCCCCCCNNGGGGNGGGGGGGGGGGTTTTTNNNNCCCCTNNTGTTTCNNNNAN
NCCCCCCCCNCCNNNTTTTTTTTTTTTTTTTTTT

| | |
|---|---|
| Sequence 1263 | cMhvSA054a06a1 |

NGGGGCCCTTAGCGTGGTCGCGGCCGAGGTACTTTTTTTTTTTTTTTTTTTTTTTCTCAAGCGACGCT
CANACAGGCGTAGCCCCGGGAGGAACCCGGGGCCGCAAGTGCCGTTCGAAGTGTCNATGATCAAT
GTGTCCTGCAATTCACATTAATTCTCGGNGCTAGCTGCGTTCTTCATCGACNCACGAGCCGAGTGA
TCCACCGCTAANAGTCGCCCGCGTACCTGCCCGGGCGGCCGCTCNAAAGGGCGAATTCCAGCACA
CTGGCCGGCCGTTACTAGTG

| | |
|---|---|
| Sequence 1264 | cMhvSA003c10a3 |

CCCTTAGCGTGGTCGCGGCCGAGGTACTTCACTGCGGACTTGACTTCTTGAGCAAGAAGGCTGGCA
CTGTTCATTAAGAGAATCACAGAGATGAATCTCACAATGCAGGAAAACTAGGTCATAATGTCCAG
CAAACATGAACATCTGAACTGAGAACCGGCTTTCCGAGGACTGCCCATTCTCCTCCACGTGGATGG
TGGAATCACGCTGATTTGAGCAGCTGTTTCTGATGATGAAAATACTTCACAAGGTNAGCCTTGTCT
TCAGTGGGGGGTGGCATTAGCAGTTCCTCAACACCCAGGGTTAAAACCCGGGGAGGTGTCCCCTT
GTTCCAAGATGGCACCCACATTACCAGCACCGGGACCTCAACAGACAGTTTCCAACTGCATCCCCT
TTCGTAAAGGGATTCCGGTGGTTAGTTTTCTGGGTCTTTGGGGAAAGAANGGGCCCATTCCCTGGA
CCAAATTGAAAACTTCTTTCCATTTTCCCCCGGTCCCACCACCTTGGACCGTTTTCCAAGGGGGAA
ACCTTTACCAAATTGGGGGCCTTGGCAAANGGGCCAAGCCTTTNGGGAANGGCTTGGACCTTTTCC
ATTGTTCCCCAGGTGGGGGGTAAGGGGCCNCATTTTGGGAAAAGGTTTGGAATGGTTTGGAAGGG
AATGGGGTGGTCCTTCTTGNNTGAATGGAAAAATTNCATTTGGNCCCCAANGGGAGAAGGGGGNG
GTTTT

| | |
|---|---|
| Sequence 1265 | cMhvSA018f03a3 |

CCCTTAGCGTGGTCGCGGCCGAGGTACGCGGGAACGTGGTCCCTANAACAAGAGGCTTAAAACCG
GGCTTTCACCCAACCTGCTCCCTCTGATCCTCCATCAGGGCCAGATCTTCCACGTCTCCATCTCAGT
ACCTGCCCGGGCGGCCGCTCGAAAGGG

| | |
|---|---|
| Sequence 1266 | cMhvSA004g09a3 |

CCCTTTCGAGCGGCCGCCCGGGCAGGTACATCTGCCAGTGCTCAGAAGGTCCAAGTCTCAATCCAG
ACCCCAGCAGGTCAAGTTCTCCGATGATGTCATTGACAATGGGAACTATGACATTGAAATCCGGCA
GCCTCCGATGAGTGAAAGGACTCGGAGACGCGCCTACAATTTTGAAGAGAGGGGATCCAGGTCTC
ATCACCACCGCCGCCGGAGAAGTAGAAAGTCCCGCTCCGACAATGCCCTGAATCTTGTTACAGAA
AGAAAATACTCTCCCAAGGACAGACTGCGGCTGTACCTCGGCCGCGACCACGCTAAGGG

| | |
|---|---|
| Sequence 1267 | cMhvSA003d12a3 |

ATTCGCCCTTAGCGTGGTCGCGGCCGAGGTACGCGGGGGGAGAGCAGAGCGCGGCGGCTGGAAGC
TGCTAAGTCAGAGCCGCGATGTTCCGGATTGAGGGCCTCGCGCCGAAGCTGGACCCGGAGGAGAT
GAAACGGAAGATGCGCGAGGATGTGATCTCCTCCATACGGAACTTTCTCATCTACGTGGCCCTCCT
GCGAGTCACTCCATTTATCTTAAAGGAAATTGGGACAGCCATATGAAGGACAGGGACATCACATT
ATGAAATGCACCGATTATTGAAGGAGCCCTGGGTTACAGGTTTCCGACTCCTCTCTGCCAAGGTGA
ATAAGGCCCAGNAAAGGGTGGTAAAGGAGACTCTTTGAATGGGACCATTAAAAATTTCTTGCTTG
TTAAANAAACAAGTTTNGGCTCTGGTAACCTGGACCTTTCAAAAGNCTAAAAATANTAAAAACTT
NTTTTTGGGGAAGGTATTGAAAACGATTGTCCTCGTGGATCTGGTGTACCCTGCCCCGGGGCGGCC
GCTTCGAAAAGGG

| | |
|---|---|
| Sequence 1268 | cMhvSA031e01a4 |

GGTACACATGCCAGCTCTGGCAACTACCCTATGCTGGCTCTACCACCAAAGACCCGGAACCAAAG
TTGGGTGCACAGTTTGCTCCCTGAATGGTGGGCTCAGGCACGGCTCTGACTTCATTTCTCAGGCAG
GCAACAGACACGTTTACCTTACGCTCTGGCTCCTGCTGTTCCTTGCANCAAGGGGGAATTCGATGG
GACCTAAAAATCATCTGGAACATACACAGACATGGATATCTTCTCTCTCACATAAACACAAAGACC
TTTCCCCATATTTCCGTGCAGGCCAAGCCTCTGTATTTTCCAGCATGACACTGTATTTGCGTATTGT
AGTGGATGGGACATTGGGGATCTCCTAGTCCTGT

| | |
|---|---|
| Sequence 1269 | cMhvSA062h11a1 |

CCCTTCGAGCGGCCGCCCGGGCAGGTACGCGGGTAATTTGGTTGGCCAATTAGAAATGCCTTTTTC
AGTTGGTGTATTGAAAGCTTTCCTTTAACATTTTCACCTGCTCATTGTGATTCCTCCTTTTAGTCTAA
TATCTTTCCAGGTCATACTTGTTTTTAATCATTAAATATTTTCTTCCTGGTTTTGGAGACTAAGCTGA
TAAACTTTTTTTAAAACTTAAGCATTGTCATTGCTATTTTTTTTAATTTGACTTTCCTAGGAGTTTAA
GATCAGCCATGACCAACATGGTGAAACCCCATCTCTATTAAATACACAAAATAAAAATGAGCCAC
CGTGCCTGGCCAGAATAGGTTTTTTCTTTCAACTTGATCAGTAGAAAATGGACATCAAGT

| | |
|---|---|
| Sequence 1270 | cMhvSA062e09a1 |

CCCTTAGCGTGGTCGCGGCCGAGGTACGATGTTGTGTGGGGAGAGGTGATATGGTCACTGTAGGG
AGACGGCACATGCTCACTATCATAATGGCTTCCATGGGGTGAGGAGTGTGAGTGATCACTGCTGTA
TTGCTGTCGTGAGGTGATTAGGTCATCTGCCTTGCTCANCAGCTGGGCAGGATGTGGCCTCTGGGA
GGCATGGCTGCCGTCATGAAGTCCATGAAACTGTCCTGGGAAGGCTCTCTCCCCAAGTGCACTCTG
GCTGATCAGAGTGGCAGAAATAAAGGCCAACGTTGGCTGGGGCAGANAACTGCCCCTGGATCTNN
CCTGCCAGGGGTGTTANGTGGGTTTGACAAGGTNNCAGAACGGNCAGGTTCTTATCCANCTNTAG
ACTAGAAAAATTATC

| | |
|---|---|
| Sequence 1271 | cMhvSA057d11a1 |

CCCTTTCGAGCGGCCGCCCGGGCAGGTACGGGGGTTTGGTTGACTGCCAGCCCTGGAGGGTTGTCT
TCTGCCCACACCTTTGACCATCACTTAGCCAGAGCTGGTCTTATCTCTTGACCTGGCTCGGTTAAGA
AAAGTCTTCATTCCTCCTCCTGGGGGACAGTAAGGGCCATGATGACTCCCTTTCCGGGTAACTTTA
GCTGTAAAAGAGCTGTGCTCTGTAAGAGAGATGGTGGCTCTCAGCTTGCTAAGCAAGTCCCTTCCC
AGCAAGGGCAAGGAGAAGTCGGGCATGTACCTCGGCCGCGACCACGCTAAGGG

| | |
|---|---|
| Sequence 1272 | cMhvSA009c03a2 |

GGTACTTCCCATAATCCCCACATGTTGTGGGACGCACCCGGTGGCAGGTAATGGAATCATGGGTGG
TTACCTCCATGCTGTTCTCATCATAGTGAGTTCTCATGGGATCTGATGGTTTTCTAAGGGGCTTTTC
CCCTTTTTCTCAGCACTTCCTTTTGCTGCCATCATGTGAAGAAGGATATGTTTGCTTCCCCTTCCACC
ATGATTGTAAATTTGCTGAGGCCTCCCCAGCCATGCGGAACTGTGAGTCAGTTAAACCTCTTTTCTT
TATAAATCACCCAGTCTCAGGTATGTCCTTATAGGAGCCTGAGAACAGACTAATACACCTGTCAAT
GCCAAAATGATATATTTTGGTGGATTTAAAA

| | |
|---|---|
| Sequence 1273 | cMhvSA002d03a3 |

ACTATTAGGGGGAAGTTCNGTACACACAGGGCCGTANTNGGGNGNCCCCTTCTTAAGAATGGCCA
TTGGCCNTCGGANGCCGGGCCCGGCCCAAGTTGGTGGAATGGGGAATATTCTTGCCAAGAAATTC
CGCCCCCTTTAAGCCGGGCCCCGCCCCGGGGCCAAGGGTACCCGGCGGGCCCCGTTTAAAAACAT
TGTTGTTCAACTTGGGGGCCAAGGCCGGGTGGCCCCTCTTAAATAACTTGGGTGGAATGCCTTAAG
NAAGGGTTGAATGGTTTTTTTGGGTTAAAACAAGGGCCGGGGGGGTAAAAGAATTTGGCCCGGAA
GTTTCCCTTTTTTAACTTTTTTTTTTTAAACCCTTTTCCCTTTTAATTGGAAGCCATTTGGCCCTTGGT
TGGTTTGGGGGTTTTGGACCAAGTTGGAAGGGGGGTTAAATTAAATTGGACCTTTTGGTTTTGGGG
TTTGGAATTTGGTTAAGGAATTAATTTTGGGGGGCCTTGGTTTAAAATTTNGGTCCAAGGTTTTCCA
AGTNGGTTTTTTNAAATTCCTTGAACCGCCAAGGGCCTTTTAATTGGCCGGGGAAGGGGAAGAAA
AATTGGTTTTTTTTCCAATTGGTTTTAACCTTTTAATTAACTTAAAACCATTTTAAGGTTTTCCTTTT
CCTTAATTAAGGGGGGTTGGAATTAAGGAATTTTGGGGTTCCCCAAAATTTTGGGGGGTTGGTTGG
AAGGGGAAAGTTTTCCAAAGTTTTAATTAATTGGTTTTTNGGGGGGAATTTTTTTTTTTTAAGGGGT
TAAAGNTTGGGGGGTTGGTTTTGGAAAGCCCTTTTGGAAAACCCGNCCTTTTTTCCTTTTAAAATTT
NGGGGTNGGGGCCTTGGCCTTTTTTTTAAGGGGCCCCTTACCTTTAATTGGGGGGTTGGTTTTAAA
AAATTTTTTTTTTTAACCTTCTTCCTTCNTTAACCAAAAGGGGTTTTTTTTTTT

| | |
|---|---|
| Sequence 1274 | cMhvSA003b05a3 |

CCCTTTCGAGCGGCCGCCCGGGCAGGTACGCGGGACACATTCAGAGGTGAGCCCAGAGCGGGTAA
AGTGGACTGGGGAGAACTTCGGAGGATGTTCATGTCCAGGAGCAGCCCCACGCCCTGTATGGTCG
GTGTCTAGAGCCTCACAGCAACTAAGACCAACCCAGCTCTCAGAAGAAGGAATGTCAAAATGTCA
TGTTCAATTTTACATTCAGTGCCTGGAATCTTTTCTTCACAATTGAAATGAAATGTGCTGAAGGAG
GTGAATCCATGCATTAATCTTCAGCTCACAAAGGAAATACTACATAAGAAGCAAGACCACAGACT
CAAGACGGACATAATTGGATTTTTTTTGCCATGGCCTGGAAAGAAAGGTACCTCGGCCGCGACCAC
GCTAAGGG

| | |
|---|---|
| Sequence 1275 | cMhvSA002c09a3 |

CCCTTTCGAGCGGCCGCCCGGGCAGGTACCTATTAACATCACTCAGCTGCTGTGAAATAGGCTTAC
AGGCAACATGGAGTGTCAATTACCCAATGTTTAAAGTCGATCATACAGATTGGACTACAATCTCTA
TGGCTCATAAAGTCTTTAAAGGATTGACAGATGATTTATCTCATATGTAGACAATGATTCTCAGCA
GTTAACTAGCGCAACTTGATAATATCAATTGCTTGAGAAAATCAGATAATTGCTTGAGAAAATTAG
GACATTGCTTGAGGAAGTTAGGTAGTTAAATAAATTACTTTTTTTAAAGAATAGTTTAATATTTTGG
CAAGTAGACTTTAAAATAGGTTGGTAATATTTTAAAGGCTACTTTTAAAGAAGTAGCAATATAACA
TGTTTAATTATGAAAAATAATGTTGGAAACAATTCAATTTTCTATCAGATCATTCACAAATACAGA
AATACCATCTCAATAATTAGAAGAAGTAGCAGCAATTTCTGTCATTTTTATGCCAGTTACTCTTAGT
CCATTTATTTG

| | |
|---|---|
| Sequence 1276 | cMhvSA031h09a4 |

CCCTTTCGAGCGGCCGCCCGGGCAGGTACGGGGAAAAGTGATGACAGCGTGACTATGTAGAGTTA
TATAAACTATGTAAAAAGTCATAAAAATGTGAGTGGAGTGAATTTGTCACCTCGATTTTCTTTTCC
CTTAACCACTCTACTTTCCTTCTCTCTCCATCTGTAATGCTATGCAGTAACTTCAGTTTTATGCTTCC
ATCCATGGCAGATATCATCAAGCAATCTAACACTTATTCTTGTTGAGGTTCCAGTAAGCCTTGAGT
CCAAGCTGCCACTACTACAGGGGGTTATCCACATGGAAAGTGCAGATTGTTACTACTCACCTCATT
CCGTAAGCAGAAGCAAATTCTGTATAGATGAAGGACTTAACTATGACAGCCAATACTTTAAAATA
TTTAGAAAATAAATATTTTTATTATC

| | |
|---|---|
| Sequence 1277 | cMhvSA057c11a1 |

CCCTTAGCGTGGTCGCGGCCGAGGTACGCGGGGAATTGCTAATGGGAATGGGGTTTATTTTGAGGT
GATAGAAATATTGATGAAATTAGAAATTGGCGGTGATTGCTAATGGGAATGGGGTTTATTTTGAGG
TGATAGAAATATTGATGAAATTAGAAATTGGCGGTGATTGCTAATGGGAATGGGGTTTATTTTGAG
GTGATAGAAATATTGATGAAATTAGAAATTGGCGGTGATTGCTAATGGGAATGGTGTTTATTTTGA
GGTGATAGAAATATTGATGAAATTAGAAATTGGCGGTGATTGCTAATGGGAATGGGGTTTATTTTG
AGGTGATAGAAATATTGATGAAATTAGAAATTGGCGGTGATTGCTAATGGGAATGGNGTTTATTTT
GAGGTGATAGAAATATTGATGAAATTAGAAATTG

| | |
|---|---|
| Sequence 1278 | cMhvSA003a10a3 |

CCCTTTCGACGGCCGCCCGGGCAGGTACGCGGGGAGAGACAAAAACAGAAGAGGGGAAACATGT
TTCCTACTGACGACAGGTGATTACACGTGTGCTTCTGATGGAGGGATCAGGAAAGGATATGAAAA
ATCCCGAAGCTTAAACAACATAGCGGGCTTGGCAGGCAATGCTCTGAGGCTCTCTCCAGTAACATC
ACCCTACAACTCTCCTTGTCCTCTGAGGCGCTCTCGATCTCCCATCCCATCTATCTTGTAAACCAAA
CAACCAAACTGCATCAGTCGGCTAAATTGTATTAATTCAAGTGCTGTTTACCCCATAATGGAAATA
ATTAAATGTAGAGTTACTCCAGGCTCCATTAATACAGTATAAATCTTGCATGATACTACAATTTGA
AGTCAGAAATGCCACTTGGGTAGCTAATGAATCTTACCCAGGCTTTAAAGATTGTCTAAAGTAGTG
CTAAAATCCCTCCTATTAATTGCCCTGATATCCTTTTGCAATAAAA

| | |
|---|---|
| Sequence 1279 | cMhvSA002d05a3 |

CCCTTAGCGTGGTCGCGGCCCGAGGTACATGCCTGTAATCCCAGCTACTGGGGAGGCTGAGGCAG
GAGAATTGCTTGAACCTGGGAGGCAGAGGTTTTAGTGAGCTGAGATCCCGCCATTGCACTCCATCC
AGCCTAGGTGACAGAGCGAGCGAGACTCCATCTCAAAAAAGAGAAAGAAGAAGAAGAGAGCTCA
ACAATGCAGCCAGGGAAGATTTCCTGTAGGAGTCTTGAGACAGGAGAAAGAGAGATGGAAGAGA
AAGAAAGCGCATGCTGCCTCTGAAAAAATGGAGAGATCACCCCCGCGTACCTGCCCGGGCGGCCG
CTCGAAAGGGCGAATTCCAGCACACTG

| | |
|---|---|
| Sequence 1280 | cMhvSA049h10a1 |

CCCTTTCGAGCGGCCGCCCGGGCAGGTACTTCCGATCAGCCTCCTACAAACCCTCTGCTTTCAGTCT
TCAAGCCATTCTCCACACAGAAGCTGGGAAGAGCTCTCAAAGGCAATGCCAACCATGTTCCTACCC
TGCTGAAAACCTCCCAATGAGTTAGGATGTTAGGCTCTCAAAGCACTTAACAGCCTAACTCCATCC
CATGACCTCGGGCCCTCCTTGCTCTTTTCCCACCTTTCCCTCATTGCTTCTTACCTCGGGTCCAGCCA
CAATGGTTTCCTTTCTGTTTCCTGAACAACTCAGACCTTTTCCAGTCTTAGGACTTTTGCTGTTGTTC
TTTCTGCCTGAAGCCTTCTTTCTGCCAGCTCTCGGCATGCTTTTCTT

| | |
|---|---|
| Sequence 1281 | cMhvSA058c10a1 |

CCCTTAGCGTGGTCGCGGCCGAGGTACTAGCAGAATTCAGCTCCTGCAGTGATAGGACTGAGGTCC
CTGTTTCCTTGTTGGCTATCAACTGGGGTTTGCTCTGGGCTCCTGGATACTGCTGCATTCCTTGCCA
GGTAGTCCTCTCCATCTCCAAGCCAGCAACAGCACATAAACCCCTCTCCTGCTTCGAATCTCTTACC
TCCTCAGCTTCTGACCTCTAAATACAGGTTTAAAGGGCTCTGGCAAATGGGTCAAGCCCACTGACA
ATAAATTCCCTTCTCGAAGTCAACTGTGCCATATATTAAACATAATCACAGGAGTATAAGCCACCC
TAGTCACACAGCCCATGGATTATGCAATATATACTGGTAGTGGGTCTACTGGAGGTCATTTANAAT
TCTACCTACCACAATTTACAAGGAAA

| | |
|---|---|
| Sequence 1282 | cMhvSA018c01a3 |

CCCTTTCGAGCGGCCGCCCGGGCAGGTACAAGGTTGGTAGGAGGAAGAGAAGAAATGATTGGCTC
CCAGAGGCTTCATGGGCTCCCAATTCATGATTCTTTCTCTGTGGCTAATTTTTGTTAAGTATAAGAA
TTCCAGGAATCTCTTAGGAATTGTGGAGACTGCTTTCTCCTGAAATATAAAACATCTGCTCTTGGTC
TGTTTGGCGCTCCACTGTCTGAGGGGAAAACAGGGAAAAAGAGGTAATATAAAACAGACATTGTT
TCAGACAATAAATCCCCCTTTACTCATTAATGAGAAAATAAATTTAGGGCCAGANGTGTCAGACTT
TTCANGANGCCTCTTTGTCTTTTCTTTTCTTTTTTTTAATAATTTAAAAAAAG

| | |
|---|---|
| Sequence 1283 | cMhvSA031e06a4 |

CCCTTTCGAGCGGCCGCCCGGGCAGGTACCACCTATGAAGTATTCTGCCTAAAGATATTAAACCTG
AAGCTTATCAAATCTGTAAATCTGACTACGACTTGACTGAAAATTTAGTGGCAAAGGAATATAGTA
AATGACATCACAAGGATATAGCATCCAAACCCAGAAAGCGGATATTCTTTAGGATAAATGACCCA
GTTTCCTCAACAATGAAATGGCCTGGAATAGAAAAAAGAGGGAGAACTTAAAATAACATACCAAC
CAAATATAGCACATGGATCCTGTTTTAATATGGATTCAGAAATCCAATTCTGAAATGACATTTTTT
AAAAATCANGAGGCCGGGCGTGATGGCTCATGCCTGTAATCCCAGCACTTTGGGAGGCTGAGGTG
GGCGGATCACAAG

| | |
|---|---|
| Sequence 1284 | cMhvSA041b10a3 |

ACCAAAACTTGTCCGAAAATTATAGCTAAAGTTTTCTCACTTTTCCTGTCTTTCTCACTACTGGGAA
GGCATTAGGAATGGAATTATCTGAGCATGCAGAATTGTGTTTTATTTGCAATAGGTGAGTATTAAC
AAAAATGCATAGGTGTGCATCTATAAAATTTATCATATACACTCAGTATAGACAAATACTTATGAA
ACATTAGAAAATCAGCTGAATACCTTGTTAATACACAGTATCATTCAGCATAATTGAGTTTCTAAA
TTTTAATAAGTTCTCAGGCGATGCTGATACCAGTGGTACC

| | |
|---|---|
| Sequence 1285 | cMhvSA003e11a3 |

CCCTTTCGAGCGGCCGCCCGGGCAGGTACGCGGGGACACATTCAGAGGTGAGCCCAGAGGGGGTA
AAGTGGACTGGGGAGAACTTCGGAGGATGTTCATGTCCAGGAGCAGCCCCACGCCCTGTATGGTC
GGTGTCTAGAGCCTCACAGCAACTAAGACCAACCCAGCTCTCAGAAGAAGGAATGTCAAAATGTC
ATGTTCAATTTTACATTCAGTGCCTGGAATCTTTTCTTCACAATTGAAATGAAATGTGCTGAAGGA
GGTGAATCCATGCATTAATCTTCAGCTCACAAAGGAAATACTACATAAGAAGCAAGACCACAGAC
TCAAGACGGACATAATTGGATTTTTTTTGCCATGGCCTGGAAAGAAAGGTACCTCGGCCGCGACCA
CGCTAAGGG

| | |
|---|---|
| Sequence 1286 | cMhvSA010a03a3 |

CCCTTAGCGTGGTCGCGGCCGAGGTACAGAACCCAGGAGATCCCCAGTCCCTGCGATGTAGGATC
CCGGACCCCCGGCGCTAAGTGGAGATGCGCCAGCTGCCCCACACTGGAGAAGGCTCAAAGAAAAC
AAATCCCACCCTTCGCCGCAGGTGGATTCTCCTCCCCTAGAGCTACTGTCCAGTTGCTACTGGCCTC
CAGCAAAACAAACATCAGTATGGACGGAAGGAGCAGGACGCAGGGTGGGGAGGGTCACCTTTCT
GGGAGAAAAGAAAGNCCGCGGNCTANCGTACCTGCCCGGGCGGCCGCTCGAAAGGG

| | |
|---|---|
| Sequence 1287 | cMhvSA033d05a3 |

CCCTTAGCGTGGTCGCGGCCGAGGTACTTTTTTTTTTTTTTTTTTTTTTTTTTNAATTTTTTTTTTNNT
TTTTTNNAAAAAAANTTTTNNTTTAAAAAAAAAAAAAAANTTTTNCNNNNAAAAANAAANNTNAA
AANNNNTTTNCCNGGNTTTNAAAAAAAANTNNTTTTTNNNNAAAAAAAAANTTTTTNGTTTNCCC
NNAAAAAAAAAAAAAANNNNNTTTTTTTTAAAACNNNTTNNTTTTTTTNNCCCCCANCNAAANTTT
NAAAAAANGGGNTTNCCAAAAAAAANNGNTTTTTAAAAATNGNNANANTTTTTTTNCCCNAANN
NCCNTTTTTTAANTTTTTTTAAAANNNANGNTNCNTNNTNNCNNNTTTNAAAAAAAAA

| | |
|---|---|
| Sequence 1288 | cMhvSA050h05a1 |

CCCTTTCGAGCGGCCGCCCGGGCAGGTACCATAGATCACTGGTAGGGGAAACAAAAGCAAAAGCA
AAACAAAACAAAAACAATAGATCCTGATGACACAGGTCTATTTATACAAACGATTGAAGCAAAAA
TCAATTGTAACTGTATCAGTTTATGCAGGGAGAAATGACAATTCTATTGTCATGTGGACTAGGACA
ATATTGGTGACAGGATGGGGTTTGGAAAGCTTCAAAATAATTGGGTGTTATGTTTAAACAGCTCAT
AGGTGCCCCCATTTACCACATACCCGTATTGGGGCCCGCCAATTTATTTTTCTTTCCAGGTTTTCTG
GTTGCCAAAAAATGCCTGGAATTTCCAACCCAACCCCCCTTCACCAATTATTTGGTACCCTCGGGC
CCGCGACCCACCGCCTAAGGGGCCGAAATTTCNCAGCCACACCTTGGGCGGCCCGTTACTTANGTG
GATCCGAGCTCGGTACCCAANCTTTGGGCGTTAATTCCATGGTCNATTAAGCCTNGNTTTCCCTTGT
GGTGGAAAAATTGGTTATTCCCGCTCACCAAATTTTCCCCACCACCAAACATTACCGAAGCCCGGG
AAAAGCCATTAAAAAGGNTGTTAAAAAGGCCCTGGGGGGTG

| | |
|---|---|
| Sequence 1289 | cMhvSA057b06a1 |

CCCTTTCGAGCGGCCGCCCGGGCAGGTACCTTTCTTTCCAGGCCATGGCAAAAAAATCCAATTATG
CCCGTCTTGAGTCTGTGGTCTTGCTTCTTATGTAGTATTTCCTTTGTGAGCTGAAGATTAATGCATG
GATTCACCTCCTTCAGCACATTTCATTTCAATTGTGAAGAAAAGATTCCAGGCACTGAATGTAAAA
TTGAACATGACATTTTGACATTCCTTCTTCTGAGAGCTGGGTTGGTCTTAGTTGCTGTGAGGCTCTA
GACACCGACCATACAGGGCGTGGGGCTGCTCCTGGACATGAACATCCTCCGAAGTTCTCCCCAGTC
CACTTTACCCCCTCTGGGCTCACCTCTGAATGTCCCCGCGTACCTNGGCCGNGACCACGCTAAGGG

| | |
|---|---|
| Sequence 1290 | cMhvSA010h05a3 |

CCCTTTCGAGCGGCCGCCCGGGCAGGTACGCGGGACATTCAGAGGTGAGCCCAGAGGGGGTAAAG
TGGACTGGGGAGGACTTCNGAGGATGTTCATGTCCAGGAGCAGCCCCACGCCCTGTATGGTCGGT
GTCTAGAGCCTCACAGCAACTAAGACCAACCCAGCTCTCAGAAGAAGGAATGTCAAAATGTCATG
TTCAATTTTACATTCAGTGCCTGGAATCTTTTCTTCACAATTGAAATGAAATGTGCTGAAGGAGGT
GAATCCATGCATTAATCTTCAGCTCACAAAGGAAATACTACATAAGAAGCAAGACCACAGACTCA
AGACGGACATAATTGGATTTTTTTTGCCATGGCCTGGAAAGAAAGGTACCTCGGCCGCGACCACGC
TAAGGGCGAAT

| | |
|---|---|
| Sequence 1291 | cMhvSA037a03a3 |

CCCTTTCGAGCGGCCGCCCGGGCAGGTACTTTAAGAAGTAATGCCCTTGAGTTAGAAAATCATCAT
TTTAAAATCTCTGATGATATAATGGATTTAGGCAATAATCATCAAAAAACTAAGTTAAGACTACAA
CCTGTCAACCAAATACCATGTGTAGACCTTGTTTGGATATTGACTTAAGCAAATAACCCTACAAAG
ACACTTTTACAATCAAGAAAAACTGAATGGGACTGCGCATGGTGGCTCATGCCTATAATCCCAGCA
CTTTGGGAGGCAGGTGAATTGCTTGAGCCCAGAAGTTTGAGACTAGCCTGGGCAACATGGTGAGA
CCCTGTCTCTAATATAATTTAAAAAAAAGAA

| | |
|---|---|
| Sequence 1292 | cMhvSA033h12a3 |

CCCTTAGCGTGGTCGCGGCCGAGGTACATGTTAAGGTTTGGTGAATGCATGCATTCACGGAACTAC
CACTCCAGTTGTGTTAGTTTCCCATGGCAGCTTTAACAAATTACTGCAAATTTCATGGCTTAAACGA
ACACACATTTATGCTTACACAGTTCTGGCAGCTAAATGACCAATGGGTTTCATTGGGACAAAATCA
AGGTGATGGCAGAGCCCTGCTTCTTTTGGGGGCTCTAGAGTCCATCTGCTTCCTTCCCTTCTCCAGC
ATCTGGAGGTCACCTCATTTATTGGCTTGGGTCCCTGAACTGCATCACCTTTTCTTTCTTGTGTCCAT
TGTTTTCTCATCTTCCTCCTCATCTGTCTGCAAATCTCCCTCTGCCTCCCTTTCAT

| | |
|---|---|
| Sequence 1293 | cMhvSA032e06a3 |

CCCTTTCGAGCGGCCGCCCGGGCAGGTACTTTTTTATAGAAGCCCAACTGGACTGACAGATGTCAA
GGGGTTGGGGGATCCTCAGTAGGCTAACCTAGCAGAGTTCTTGCTAAAACTGGGCTAGACAGGCC
ACAGACAAGATAGCCAAAATCAAAGCCTAGTTGAGAAGGGAATTCAGAGGAGCATGACTAAAAT
TTGGTCAAGGGGAGAGTCTTTGTCACCCCAGCACCTAGCACAAGTGGTTGGTACCTCGGCCGCGAC
CACGCTAAGGG

| | |
|---|---|
| Sequence 1294 | cMhvSA010h01a3 |

CCCTTAGCGTGGTCGCGGCCGAGGTACCTTCACTCTCCACCAAGCACCTGTTATCGGAAAACGTCC
AAACACTTTACATGTCTCTTGTGTGTTTTCATCACAAATAGAAACTAAAAAAAAACAAACAAAAAC
CCACAAAAGTTAACTCTGGAGATTATTCANAAACCGTTTCCTCAAAGTTTTATCAAACTTACCACT
ATCTTTAATCTCCCTACAGCACTCTCTAAAGATGTCTGGTAGGGTGCCTGTAACACTGCATTCTGCC
TACCTCTTTTTCTGTCTCCCTCCACTACACTGTAAATACTAAAACAGGACACTGTTTCGTTTGTCTTT
GTATTCCAAAACGCAAGCACAGTACCTGCCCGGGCGGCCGCTCGAAAGGGCGA

| | |
|---|---|
| Sequence 1295 | cMhvSA010g09a3 |

CCCTTAGCGTGGTCGCGGCCGAGGTACAGATTATTTCATAGCCCAGGTATTAAGCCTCGTGCCCAT
TAGGTGTTTTTACTGATCCTCTCCCTCCTTCCATGCTCCACCCTCCAAAAGGCCCCAGTGCGTGTTG
TTGCCCTCTATGTGTCCGTGTGTTTTCATCATTTAACTCCCACTTATAAGTGAAAACATGTTAAGTA
TTTCATGTTAGTTTGCTCAGGATAATGGCTTCCAACTCCATCCATGTCCCTGCAAAGGACATAATGT
CCGTTCTTTTTTATTGGCCTAATTCTTAGGCAGTCTTTTCTGGAATTGTGACAGAAAAGGTTCAAAG
CAGTTATTTTTTTTCATATTATATCCATAGTTGTGTTTTTA

| | |
|---|---|
| Sequence 1296 | cMhvSA032b04a3 |

CCCTTAGCGTGGTCGCGGCCGAGGTACGCGGGTGGACTGGGGAGAACTTCGGAGGATGTTCATGT
CCAGGAGCAGCCCCACGCCCTGTATGGTCGGTGTCTAGAGCCTCACAGCAACTAAGACCAACCCA
GCTCTCAGAAGAAGGAATGTCAAAATGTCATGTTCAATTTTACATTCAGTGCCTGGAATCTTTTCTT
CACAATTGAAATGAAATGTGCTGAAGGAGGTGAATCCATGCATTAATCTTCAGCTCACAAAGGAA
ATACTACATAAGAAGCAAGACCACAGACTCAAGACGGACATAATTGGATTTTTTTTGCCATGGCCT
GGAAAGAAAGGTACCTGCCCGGGCGGCCGCTCGAAAGGG

| | |
|---|---|
| Sequence 1297 | cMhvSA018a09a3 |

CCCTTTCGAGCGGCCGCCCGGGCAGGTACCACCTATGAAGTATTCTGCCTAAAGATATTAAACCTG
AAGCTTATCAAATCTGTAAATCTGACTACGACTTGACTGAAAATTTAGTGGCAAAGGAATATAGTA
AATGACATCACAAGGATATAGCATCCAAACCCAGAAAGCGGATATTCTTTAGGATAAATGACCCA
GTTTCCTCAACAATGAAATGGCCTGGAATAGAAAAAAGAGGGAGAACTTAAAATAACATACCAAC
CAAATATAGCACATGGATCCTGTTTTAATATGGATTCAGAAATCCAATTCTGAAATGACATTTTTT
AAAAATCANGAGGCCGGGCGTGATGGCTCATGCCTGTAATCCCAGCACTTTGGGAGGCTGAGGTG
GGCGGATCA

| | |
|---|---|
| Sequence 1298 | cMhvSA002e01a3 |

CCCTTTCGAGCGGGCGCCCGGGCAGGTACAGTCCACTANCATGGAAGCTATGGGTGTGGGCATNT
AAAANTGCCCCGTAAGCAGGTGTGGCCAGGCTGGGGCCNTTGGAAAAGNCAACCAANTNAAGAN
TGCTNANATCANACCANCCCCATCTCAAGTGCAAGATTGCCCAGCCTCCANANATCATGTNTCAGA
GGATANCTCTGTCANAACNNAACCCAGGCACANTTCAANTNCTCTGCNGNNNGTAGTTAGACTTC
TTTTATTAAGCAANTCTCCTTTTTTTAAAAAGGGAACTCTCGGTCCTGNTCTNTGCTGGGCAATCT

| | |
|---|---|
| Sequence 1299 | cMhvSA032d10a3 |

CCCTTAGCGTGGTCGCGGCCGAGGTACGCGGGTGAGATGGCAAATATTTATTAATCATCCAACTGT
GTATCAGACACTAAGAATAAGCTGGGAGGCCATGGCAAGTGAGGTCACCACAGTCCCTGCCACAG
TGGAGGTTATGGTATACAGGTAAGGCAGGGAAGAGCACTGCAAAGGGTTTGCCCATTGCATCAGT
CATTTATTTATGCACATGTTGATTCAACAATTATTTCTATGCCAAGCTGTCTTCAAGGTGCTGGAGG
AAATGAAGCGTACCTGCCCGGGCGGCCGCTCGAAAGGG

| | |
|---|---|
| Sequence 1300 | cMhvSA003g11a4 |

CCCTTAGCGTGGTCGCGGCCGAGGTACCTGCCATCCAATACGGTCATTAGATTGGGTCATCTTGAT
TAGATTAGATTAGATTAGATTGTCAACAGATTGGGCCATCCTTACTTTATGATAGGCATCATTTTAG
TGTGTTACAATAGTAACAGTATGCAAAAGCAGCATTCAGGAGCCGAAAGATAGTCTGAAGTCATT
CAGAAGTGGTTTGAGGTTTCTGTTTTTTGGTGGTTTTTGTTTGTTTTTTTTTTCNCCTTAAGGGAGGA
TTTAATTNGCTCCCAACTGATTGNCNCTTAAATGAAAATTTAAA

| | |
|---|---|
| Sequence 1301 | cMhvSA054c01a1 |

NGGGGCCCTTAGCGTGGTCGCGGCCGAGGTACTTTATGTTTACTCTGTCAGGAAAGCGTCAGATGT
TTTTATTTCCAATTATAAGTTTTGTAATGCATCATGTATTTTGCTGACAGTCTTCAAGTTCTTGAAAT
AGTGAACAAATTAACAGCAGATATNGGNGTGAGAGAATTAGAAAACCAACTGGCAACTCATATGA
TAGAATTCAGATACAGGGATGGGTGGAATGGGCTCATTTATTTTATTTTCTCAGTCATACTTTGTAA
TTAACTTAGGCNAAAAAAAAAAAAAAAAAAAAAGTACCTGCCCCGGGC

| | |
|---|---|
| Sequence 1302 | cMhvSA002e03a4 |

CCCTTAGCGGCCGCCCGGGCAGGTACAGAGCTGGAGGCCCAAACAGCCAGCCAAATCTTGCTGTA
TTTTATCCACCATAGTATAATCCAGAGACTGTGGACCCCAAATTGGGATGCTTTTAAAATCCAAAG
TAGTTCTGTATACACATTTGAAGAAAAATGCTGTTGAAGAAATGTATCCATAAAACACTTCAGGTC
AAAAAGCAAAAGAATATCAAGAAAAAGTTTAAATAACATGATTCCTACTGGTTTTAGATCATAAT
TATCATCCTATATTATTTATATTCCGTATCACTGTTATCTTTCTCTGACAAATAATTCTGAAATACA
ATACATTTTAAAGTTATGCAGGATTTTAAAGACCTCGTCTTCAACAAATACAAGAAGTTTAATAAC
AAACTTTAAATAAATGCTCATT

| | |
|---|---|
| Sequence 1303 | cMhvSA054d07a1 |

GGGGGCCCTTAGCGTGGTCGCGGCCGAGGTACCTGGGACTACAGGCACACACTACCATGCCTGGC
TAACTTTTGTAGTTTCTGTAGAGACGGGTTTCACCATGTTGCCCAGACTGGTCTCAAACTCCTGTGC
TCAAGCAATTCTCCTGCCTCGGGCATGNNCAAGTGCTGGGATTACAGGCTTGAGCCACCACACTCA
GCCATTAGGCATTTCTTTTTGTTCCAGAGGTCTGTGAAAAACTATGGAGACATGAAGGGCAGTGAG
CCGAGAAATCGTGGCGCCTTCTAACCTACAGGATAAGGGCGTATAATCAGACTTAGTTA

| | |
|---|---|
| Sequence 1304 | cMhvSA037h01a3 |

TCTAGATGCATGCNCCAGCNGNCNGATGGATNTCGTGCATAATTCGACCTTAGCNTGGTCGCGGCC
GAGGTACGCGGGGTCAAAGCCACTGTTTTTATAATCTACTCCTTATATAAAACATTAAGTGAGGCC
AGGTGCAGTGGCCCATTTCTGTAAACCCAGCACTTTGGAAGGCCAGTGCAGGTGGATCACTTGAGT
CCAGGAGTTTGAGGCCTGCCTGGCCAACATGGCGATACCCTGTCTCTACTAAAAATACAAAAATTA
GCTGGGTGTGGTGGTGCATGCCTGTAGTCCCAGCTACTCAGGATGCTGAGACATCGCTTGAACCTN
GGACGTGGAGATTGCAATGAGCTGANATCGAGACACTGCACTGCAGNCTGGGTAACAGAGTGAGA
CTTCTTCCCAAAAAAAAAAA

| | |
|---|---|
| Sequence 1305 | cMhvSA054a02a1 |

GGGGGGCCNTTAGCGTGGTCNCGGCCGAGGTACCCGGGTATAAGAATGAGACACAGTAGCTGCTT
TCATTGATTCTGTTCAACCGTTGATTGGAATTCCAAGCAAATGCAGCAAGACAAGAAAAAGAAGT
CACAACCGGAAGAGGTGGGGAGGAAGGCCGGGACAACAGCTCAGTAAAGCTGAGGTGCAAGGCT
GGGCACGGTGGCTCACACCTGGAATCCCAGCACTTTTGGAGGCCCGAGGTGGGAGGATCACCTGA
GGTGAAGACCAGCCTGGACAACAT

| | |
|---|---|
| Sequence 1306 | cMhvSA032g01a3 |

CCCTTAGCGTGGTCGCGGCCGAGGTACCACAGAGGCCAGCACAGCTTCTCGTGAAAGAGAGCTTC
TGTATTCTCAGTGGGATCCAGGCAAACAAGTAAATTCTGGCCCCACTCCCTCCACCACTCCTCTGG
GCTCACCTCCAGTCTGAAGAGATGCACTGGATCACAGGGAGATTAAATTCAAAGAAGACTGCAGG
CAAGGAGGGGCTCTGCAGCAGCTGTACCTGCCCGGGCGGCCGCTCAAAGGG

| | |
|---|---|
| Sequence 1307 | cMhvSA033g10a3 |

CCCTTAGCGTGGTCGCGGCCGAGGTACCAGTCATATTGGATTAGGGCTCATAATGTCATTTTAACT
TAATTGTCTGTCAAAAAATTCTGTCTTCAAATACAGTCACATTTCTAGGGTTTAGGATTTTAACATA
TGAATGCAGGGGGACAATTCAGTCCATAATACTGTGGTTATCACTTTTTGGTCTTAAGATGATTGC
TACAGCTCTACAACCCACATCTATTATAAAAACAAAAAGAAGAGAGAAATAAATTGAGAGAGGA
GAGTTCCTTGATCACTTTGCAGGACGTGCGACAGGGGGTGTTGCTCATCTGTTTGGCCACCACACA
TTCTCAGGCCCTTTGCAGGACAGGGAGCATGCTGACAGGCAGGTGCAGCAACCCAGGCGAGTGCC
TTGGGGCTCCAG

| | |
|---|---|
| Sequence 1308 | cMhvSA037c06a3 |

CCCTTTCGAGCGGCCGCCCGGGCAGGTACCACCTATGAAGTATTCTGCCTAAAGATATTAAACCTG
AAGCTTATCAAATCTGTAAATCTGACTACGACTTGACTGAAAATTTAGTGGCAAAGGAATATAGTA
AATGACATCACAAGGATATAGCATCCAAACCCAGAAAGCGGATATTCTTTAGGATAAATGACCCA
GTTTCCTCAACAATGAAATGGCCTGGAATAGAAAAAAGAGGGAGAACTTAAAATAACATACCAAC
CAAATATAGCACATGGATCCTGTTTTAATATGGATTCAGAAATCCAATTCTGAAATGACATTTTT

| | |
|---|---|
| Sequence 1309 | cMhvSA002a06a3 |

CCCTTAGCGTGGTCGCGGCCGAGGTACATGCCTGTAATCCCAGCTACTGGGGAGGCTGAGGCAGG
AGAATTGCTTGAACCTGGGAGGCANAGGTTTTAGTGAGCTGAGATCCCNCCATTGCACTCCATCCA
GCCTAGGTGACAGAGCGAGCGANACTCCATCTCAAAAAAGAGAAAGAAGAAGAAGAGAGCTCAA
CAATGCAGCCAGGGAAGATTTCCTGTAGGAGTCTTGAGACAGGAGAAAGAGAGATGGAAGAGAA
AGAAAGCGCATGCTGCCTCTGAAAAAATGGAGAGATCACCCCCGCG

| | |
|---|---|
| Sequence 1310 | cMhvSA058f01a1 |

ACTTTTTTTTTTTTTTTTTTTTTTTTTTTNGAGAGATGGGGTCTCACCGTGTTGCCCCAGCTGGTCTC
AAACTCCTAGGCTCAAGCAATTCTCGCACCTCAGTCTCCCAAAGTGCTGGGATTACAGGTGTGAGC
CACGATGGCCAGCCATAATGCGAAGTTTTAANAAGCTTTCAGGGANAAGGGANAGAGAATGCTCT
GGAAGCAGCCAAGAGAATCAATAGAGACATTCACCCATTTCCTGTCAGTGTTACAAGGAAGGTAG
AANAGGACAGAGCCATTGTTTGAGAAGCCTACAGGGCAAGCCAAG

| | |
|---|---|
| Sequence 1311 | cMhvSA032g06a3 |

CCCTTTCGAGCGGCCGCCCGGGCAGGTACGCGGGATGAACAAGCTCAGGAAAAATCTAAGAAGGC
CTTAATTTCTCACCTCTAGCTGACTTTCAGGCTACATAAACAGGAATTGAATGATAAGGTAGAAAT
GTGAACTCCCTGACTGAGTGTTGAAGGTATGCCCTACACATCCACAAAACCCTTGAGCAAAGACTA
AACTAAATAAGCAGAGACTTAAGTGGCCACACATAAAAAAGAATACAGACTGCAGAATGTGTTCC
CCCAAAAAATCACTAAGCAAAGAGCAGGAGTAACAATAAACAGCAACAATAAATCCTGCAGAAA
AGGAGATTCTGATTTTTAGAGTTGACACATAATATTATTTAAGACACTCAGTTTTCAACAAAAAAT
TATGAGGCATGCAAAAAAAA

| | |
|---|---|
| Sequence 1312 | cMhvSA031e05a4 |

CCCTTTCGAGCGGCCGCCCGGGCAGGTACATGAGATTAACTGATGTGTCTACGTGGTGCCAGTCTG
ACTAACAGTGGATGTGTGTGTGAGTGACCCTGCAATGTCATGATGTACCTCGGCCGCGACCACGCT
AAGGG

| | |
|---|---|
| Sequence 1313 | cMhvSA002d05a4 |

NGCCCTTAGCGTGGTCGCGGCCGAGGTACATGCCTGTAATCCCAGCTACTGGGGAGGCTGAGGCA
GGAGAATTGCTTGAACCTGGGAGGCAGAGGTTTTAGTGAGCTGAGATCCCGCCATTGCACTCCATC
CAGCCTAGGTGACAGAGCGAGCGAGACTCCATCTCAAAAAAGAGAAAGAAGAAGAAGAGAGCTC
AACAATGCACCAGGGAAGATTTCCTGTAGGAGTCTTGAGACAGGAGAAAGAGAGATGGAAGAGA
AAGAAAGCNCATGCTGCTCTGAAAAAATGGAGAGATCACCCCCGCGTCCTG

| | |
|---|---|
| Sequence 1314 | cMhvSA058g09a1 |

CCCTTTCGAGCGGCCGCCCGGGCAGGTACTTTTTTTTTTTCTTTCTTTCTTTTTTTTTTTGTATTTTTA
GTANAGACTAGGTTTTACCGCGTTAGCCAGGATGGTCTGGATTTCCTGACCTCGTGATCCGTCCGC
CTCGGCATCCCAAAGTGTTGGGATTACAGGCGTGAGCCACGGAGCCCGGCCATAGGCCTGTTTCTT
ATTCTATATTCCTGTTAATGTAAACCTCCTNAGATNGGAAGACAATCANTTTTACAGGGTAAGAAT
TGTTTTAATTATGTGGCAGCTTTTCTCCAAACATGAAGAGAAACATTAGAAATACGTTTAATAAAA
TCTCTATTATTTTGTTTTCTTTCAAGT

| | |
|---|---|
| Sequence 1315 | cMhvSA005f09a3 |

CCCTTTCGAGCGGCCGCCCGGGCAGGTACTGGGAATGACTGAGTAGTCACAAATTCAGAGAGCTG
CTGGGAGGTAGATGAGTTGGGGCTGGGAGGTGTCCATGGGATTTGGGGGCTTGAGGGTCACGGTC
ACCTCAAGACANCAAGATG

| | |
|---|---|
| Sequence 1316 | cMhvSA031a07a4 |

CCCTTTCGAGCGGCCGCCCGGGCAGGTACTTTTTTTTTTTTTTTTTNGGTTTTTTTTTTTTTTTTTTTT
TTTTTTTTTTTTTTTTTTTTTTTTTTTTTTTTTTTTTTTTTTTTTTTTTTTTTTTTTTTTTATTTTTTATTGT
TTTTTTTCCAAACCCANAAAGCGGATATTCTNTAGGATNANTNNTTTTTTTTTTTNAATAANAAAAT
GCCNNCNTANAAAAAAGAGGGANAACTTAAAATNCAACCAACCAAATATAGCACATGGATCCTGT
TTTAATATNGGAT

| | |
|---|---|
| Sequence 1317 | cMhvSA062c08a1 |

CCCTTAGCGTGGNCGCGGNCGAGGTACCTGCTGTCTTATGCATGTTTAACACAACAGCAACAATAA
TATAAGTAGTTAGCATATATTAAAGCNTTAACGAACACCAAGCATCGTTAAATATATTACATGTAT
TATTGCTTAATTTTCACAACATTACTAATGG

| | |
|---|---|
| Sequence 1318 | cMhvSA003e10a3 |

GTAGGAGGCAAAGTGATCTGCTTGAAAATATGNNTGAAAGATAATCAGCAAATAATTTCAAATCT
TGGAACTGTCATTATGAATTTACTGCCATTAGATTGTATTGAGGTCCCTGAAGTCATGGGATAACC
AGAAGGGGGAATTTGAAGATTCCATTTAATAAAAAGAAGTTGATACAAAGAAGCTAAGATATATA
ATAAAATTTTCATAGTTTGGAAGAGAACATGATGCTTCTGGTATTCCAATTACTGATTATACCTTTT
GTTCATAGNCTTTTTAAANCTGAGCTCTTTGGCCAATCCCATTTCAGCCCGCTTTGGTCTCATTAGG
TACCTGCCCGGGCGGCCGCTC

| | |
|---|---|
| Sequence 1319 | cMhvSA054c09a1 |

CCTTTCGAGCGGCCGCCCGGGCAGGTACTTTTTTTTTTTTTTTTTTTTTTTTTCAAAACTAGTGACTC
CTGTCACTCTNTTCCACTCTAAAAGGGCAANATGCAATGGCAAAAGGGCACATAATTCTGTTTCCT
TGAGTGTCTNTTAGTATTAANGNAGGCTCAGTTTNTAAATATTAAAATGACCCACAATAAGAGCTG
CAATGATTAAGTTTGTGACTTGTTATACCAATCAATGTATGACAAACTTANAAAAACTGTATATAA
TTTACAATGACAAGAGAGGAAAGAGGA

| | |
|---|---|
| Sequence 1320 | cMhvSA058d08a1 |

CCCTTAGCGTGGTCGCGGCCGAGGTACGCGGGGTTCAAAGTCTATTTTTATTCCTTGATATTGGACT
TTTATTTTTTTTTATTTGNGGATGGGGACATTGTGA

| | |
|---|---|
| Sequence 1321 | cMhvSA010c06a3 |

CCCTTAGCGTGGTCGCGGCCGAGGTACACAAACCCCTTTNCAAATGAGGACCGTGAAGAAAGGGC
CCAAAGTATCTGCACACACACAGAANATGCCCAGACAGCANCTAGTAACAGTTCTGGGTGCCACT
TACTATGATCCTGGANCAGCTGGGCTGCGATGGANACCCGGCNCCGCTCACCCGTGGAAATGCCC
CCCAAGCTGNANTTGCCAATCAGTCGGTCTGCCACATGGCTCAGACTCANNTCTNCCATGACNGTC
TNCACCTGCAGGAGACACAAATTACANGGAAGGCTGGGAGTCTCTGTGGCTGCTATTTCAATTCAT
GGGCTGGGGAGGACATGAAANANGCAGCANACCGCCCAAGAATC

| | |
|---|---|
| Sequence 1322 | cMhvSA002a11a4 |

CCCTTAGCGTGGTCGCGGCCGAGGTACTTTTTGCATTTTCAAATGACTTTGACTATTGCCAGAGTCA
TTATAGACCTGCCTATGATGTAGGAGTTTATTGTATCTAGTGGAAAACATACCTG

| | |
|---|---|
| Sequence 1323 | cMhvSA032g09a3 |

ACTTTTTTTTTTTTTTTTTTTTTTTTNGGNAAANTTTTTTNTTTNGGGGAAAAAAAANCNAAAAAAA
AANTTTTTNNNNAANTTTTNNNAAAAAAAAAAAANCNNCNAANNNNGGGGGGNTTTTNAAAAAA
ANTTTTNNNAAANCCCNNTTNCCNNNTTNNNCNAAAAANAAANNTTTNNNNTTNNANGGNNAAA
NNNNNTNGNTTTTTTAANGGGTTTTTGGGGGGTTCCCCCAAANCCCNAAAAAAAANAAAAATTNN
NNGNNGGGGGNNNAAAANCCCNTAAAAAANNCCCNAATTTTTNNNTTNGGNAAAANNCCCCANN
NNNNTTTTTGGGNAAAAANNTANCCCTTNGGNNNNNCNTNGGGNNAAAAAANGGCCCAAATANT
TTTTTTCNAANGGGGTTNAANNTTCCCAANTTTTTTTTGAAAANANNGGGGTNCCTTTTNGGGNNT
TGGNAAANNTTTNAAAAAANGGGGGGGGGGGNNTTNTNNNGNTGGGCNCCNTTTTAAAGGGGGA
AAAAAAANAGCNCCCCNCCCTTTTANNNTNANTTNGGGGAAAAAGNGGNCCCAANGGNTTTNTTT
NTNCCNNTNAAAAAATNTNTAAAAGGGCCNNGGGGGGTTTTT

| | |
|---|---|
| Sequence 1324 | cMhvSA004a11a3 |

CCCTTAGCGTGGTCGCGGCCGAGGTACTGCTGCATTTTTGTTTGTGTATTNANTCNTTNCCTTTGNT
TNCAAGTGAAATNTTTTGAAAACAGTCCTATTATGGCTCAAATAAGCAGAAATGGGGATTTTCTTA
GGCTAATTGANGAACATGGNGAGGGTGGCANGGACGACTGCTGACACANGGCACGCTGGCCTGG
AGAAGCAACAGCTGCTGGCNTGCGTGGACACCCTTTGCAGACGTGTCCCCTGCGGGGGATGATAA
TTCATCACCCTCCANCCCCCANCCTAGGGGCCTCTCACACAACCCCATCNTTTCACCACANAAGAA
CACANTGCCGATGTGCCNATGCTTCCAATCACCANGACCCAANGGTTGCCNACACCTTGGTCCAAN
ATGTGGGATCAAAATGGGGTGGATTATNTTNAGGGGGGCTNACTTCTAAATTTNAACAAGCCTGA
AACTTTCACTGGGGAAAATACTTTTTTAACCCCACTCTAANGNATTCCATTANANATGACATCCAT
TTTNAANTTANAAGACATGTTTTTACCTAAAAAATANATGAAAAANGCTTNGNNTTNAAAAATGG
GAAAAACCTATTGCTTTCCCCNAATNCCNNAANNNNNAATTTTTTTCCTTTAAANCNTTNNGCANN
AAANAAACTTTTNCTTTTNATTNANACNNCCTTTTTTTTAATTTT

| | |
|---|---|
| Sequence 1325 | cMhvSA004a10a3 |

CCCTTTCGAGCGGCCGCCCGGGCAGGTACNCGGGATAACTNTTCATGGGAATNAGATTTATNTCCC
ANATTTAAAAGCAAAAGCTCATAACAGCNNGGATTTCACTTAAAGGAAATACTTCTGAACATGTT
GTTAAAATATTGAAGAACTAAGGCCAAGATGTTCTGTTCATTATAAAAGTGGACTTCACTAGTTCC
AATGGTATATTATTTTCAGTGGATCAAATATATCTCATATGCTGGACTTTTAATGTCTGGACNCCAT
ATNTTNTGGAAGGGCATTNATTTANTNTTATTGNGGATATTTTCATTTTATNTTANCACACNAGAC
NATTACTNCAAGCANGAATCNCCCANAGAATGAGAAAANGCTCCTGGTCCTCAGAGGGCATNGNN
AANTAGGACAGGCCAAGACATNATTNTTTTGACTTGGGCTTT

| | |
|---|---|
| Sequence 1326 | cMhvSA002e06a4 |

TATCTGCAGAATTNTCCCTTNGCGGGCGCCCGGGCAGGTACAGACCTGGAGGCCCAAACAGCCAG
CCNAATCTTGCTGTATTTTATCCACCATAGTATAATCCAGAGACTGTGGACCCCAAATTGGGATGC
TTTTAAAATCCAAAGAAGTTCTGTATACACATTTGAAGANAAATGCTGTTGAAGAAATGTATNCAT
AAAACACTTCAGGTCAAAAAGCAAAANAATATCANGAAAAAGTTTAAA

| | |
|---|---|
| Sequence 1327 | cMhvSA003d03a3 |

NGAGGAATGATGAGCTCTCTAATTNTCTCCTACACAACATTTCTTATCAANGCCCTGGATCCCNAC
CTATGANAGCCTTCCAGGGATGCCCANGGTAAACCAAATGGGGCTGACCATNTGCCCATTGTTNG
GGGAGTGNAGTTGAAAANTAAAGGNAGCCCGGTCCCCTTTAACTTAANGGTGAGCCCCTTACAAT
NANGNGGGNACCNCAAANCTATTTCATANATCCCCCCCTNCCTTTTTTGGGTTCCTTTGGCGGAAT
TGNGGNCNANNAATGGAAAATGGGGCTTTTCGTGGGGATAAANACTTTTANAAATTNTTTTCAAC
CTTTTNNTTGGGNTTTNCAAGGGGGGAATTCCAAAAAGNCCCCCCCAAAATTNCTAAANANGNNA
AAATTTNNNAACCTNAAANCAGGGNAGNTCCANATGNNACCCCGGNCGATTNCCCCAACCAAAA
AAAAAAAATNGGCCCTTTCAAATNGGTTTGGCCTTGGAAACNCCCANNGGGNAANATAGGNAAA
GTTTNCNCTTAACCAANAAAAGCCCAAGNNCGGANAAAGGGGGNCNCCCTTCGGGAACTTTTTNN
TNAGGNNATTTTTANANATAAAACGGNTANTGGTTTTTAAAGGGGGCTTTNAACGNGGNAACCAA
AAGGGGCCTTTTTCAAANAAAAAAGNGTNTNCNANGGAACTTCCCCC

| | |
|---|---|
| Sequence 1328 | cMhvSA002f02a3 |

TCCGGGCTATGGTNGNNCNTNNAGCTTNTGCAGCCACCCCTNTGCTCTNTTTTCTGCCCTGGNCCCT
CTTCTCNNCTCCNAGAGCACCATGCCTTCCATACAAGGTGGNCANCCCTGTTGCTNCTNNAGNCTG
CACCCTTNCACACCNTTCTTTCTNATGACATTCCANCTGTCTGGAATATGGGCTTCCCACCCTCCCA
TTCACCTACCCTCTCACCTGGTGAGCTTACTGTNTNGNGCCCAGCTCANACGATATGGTTGAAGAA
TAGGTGTCACCTTCATCTGAGNACTCATAGCATATTTCTTATACCTGANAGTAAACAATTGCATGT
CATTATATGGCATTTAAGTNTGTCTCCTTAGATAGCCTCTAAGTCCCTTGANGGCAGGGACTATAT
CTTATTCATCTATTTGNCCTNAGNACTACTCAGTGCCCAGCCATAGTAGGTGTCCAATAAATATTTC
AATG

| | |
|---|---|
| Sequence 1329 | cMhvSA003d09a3 |

CCATTTGTCCCCANATGGTATAGNGTTAAAAAAAGGGGGTAANGCCNTTTAACTTGGGGTGTGNT
NCCCTTCCCCGNAATNTCCCAAGCGGTTTTAANTAAANTCGGTAAGCGNAAGGGGTTCTCGCCGGC
GGCCTTAAGGGGAAGGTTCCANATTAACANAAGCNTGTAATTCTCGGGGGCCTNTTAANNATNGG
GGGNCCCNGAAAAAAATAACTTTAAATTGGCCCTNTCTTGGNTTCGGTCTTTTGGGGGAAATTNAT
TTAATTGGCGGNAAGNGGGAATTCGGGGNGNGGGAAATCTTCAATTTTCGGCCTTTANGGNGNNA
ATTGANAAAGGGGNAATTNGGGGAATTTAANGGTTAAAAATTTAAGGNGNGNCCCAAAAGGGGG
AACCCCNCCCCCTTNCCCCTTAAAGATTTNTTCGNTTTNAAGGGGGGGGACCCCNGGAANTCCNGN
NGAAAAAAAAATTTTGGGTNGGNTTAAGGGCCCCCGAAAAANTTANNGGGAACCCCCCCCGCCNG
GTTTACCCCCTNTGNCCCCCCNGGGGGGCCGGGGNCCCCGGCNTTTCCNAAAAAAAANGGGGGGC
CCGGAA

| | |
|---|---|
| Sequence 1330 | cMhvSA002h08 |

ACCTATTAACATCACTCAGCTGCTGTGAAATAGGCTTACAGGCAACATGGAGTGTCAATTACCCAA
TGTTTAAAGTCGATCATACAGATTGGACTACAATCTCTATGGCTCATAAAGTCTTTAAAGGATTGA
CAGATGATTTATCTCATATGTAGACAATGATTCTCAGCAGTTAACTAGCGCAACTTGATAATATCA
ATTGCTTGAGAAAATCAGATAATTGCTTGAGAAAATTANGACATTGCTTGANGAAGNNCCGTNNT
NAANTAAATTNCTTCNNTGAAGGAACTNGTNAACCATCNNGGAAAGGACANCTNCNGGCTTGGGA
ATGGGGGACCTTGAATNATGCTGCTTCAAAAATTCTGGCAGCAATAACATGTTTAATTATGAAAAA
TAATGTTGGAAACAATTCAATTTTCTAGGCANAATNNTTCAAAAAAGATTTCGAGGCAGTCAATAA
AATCTGTTCCATTTAAAAGGATCACCTCCAATGCCANNGTACAAAGACTGCCCCAATCCNAACTTG
CGTNGTTTGGGGGGAACCTGCTTCATAAGGTCANGGGGCCCNNNTCTTGGGAACACAAATGCCCA
ATCCTTTCCNTTTT

| | |
|---|---|
| Sequence 1331 | cMhvSA003d05 |

CCCTTTCGAGCGGCCGCCCGGGCAGGTACAAGTATCTTAGGCTACTGGACCGGGCAGGCTTTACTG
AGGGGCTCCGTGCAGCTTGCTGGTGCAGCCGAGCAAGTGGGCCTGTAGCCGACTCTTAATCCAGGT
TGGTGCTATTCAAAGAGATCATCTTTCACCCGAGGGATTTCTGGGCACCTATTTTGCGGATCAGAA
AGTAGAGAAAGAAGGTAACTTTGCTGAAAGCTAGTCTGGGGAGTTAGTAGCTGATACAGATCAGC
ATTTCCTAACTATGAGATTTCATAATATTCTCTCTTGTCTCGATTCTGAGTCACTGGTGCCTGCTGT
GGTGGCATTGTTCATGAACATGTACCTCGGCCGCGACCACGCTAAGGG

| | |
|---|---|
| Sequence 1332 | cMhvSA009f06 |

CCCTTTCGAGCGGCCGCCCGGGCAGGTACAGAAGGGCCATGCTGTTATTACTCTTACACAAGGAG
GCAGCCCTCGAGCCACAGGGTCCAGCTGTTGGCTATAATAGCCTACCGGTCTCTGATGATCACCAT
GTTTCTGGAATTCAAGCCAGGAAGAAGCAGCAATCTGTCTTCTGGATTAAAACTGAAGATCAACCT
ACTTTCAACTTACTAAGAAAGGGGATCATGGACATTGAAGCATATCTTGAAAGAATTGGCTATAA
GAAGTCTAGGAACAAATTGGACTTGGAAACATTAACTGACATTCTTCAACACCAGATCCGAGCTGT
TCCCTTTGAGAACCTTAACATCCATTGTGGGGATGCCATGGACTTAGGCTTAGAGGCCATTTTTGA
TCAAGTTGTGAGAAGAAATCGGGGTGGATGGTGTCTCCAGGTCAATCATCTTC

| | |
|---|---|
| Sequence 1333 | cMhvSA011h04 |

CCCTTTCGAGCGGCCGCCCGGGCAGGTACCGCGGGAAATGTATACCGCTGGGAATCACTAATTTTC
CCATTCCTGGAGAGCCTGGNTTTCCACTTAACGCAATTTATGCCAAACCTGCAAACAAACAGGGAA
GATGAAGTGATGAGANCCTATTTACAACCAGCTAAGGCAAGAGACTGGGACTGAGNACTTTGGGA
ANAAAGTNTTCGACCCNTCANGAATGATAAAACCCAGCAAGNGGGTGGGACTTGCTTTGNGAAAG
AGACAGTTTNAATGGAACAAGAAGTTCTTTTTCAAGGACCCTTGGGNCCAGGTGGAAAANGGGGA
AGGCCCCCGGGGCCAAGGCCCACCCCGGNGNTTNTCCAGGAAACCCCCCTG

| | |
|---|---|
| Sequence 1334 | cMhvSA012f07 |

GGGGAGGCATTGAGGCAGCCAGCGCAGGGGCTTCTGCTGAGGGGGCAGGCGGAGCTTGAGGAAA
CCGCAGATAAGTTTTTTTCTCTTTGAAAGATAGAGATTAATACAACTACTTANNCNAATATAATCA
ATAGGTTACTAAGATATTGCTTAGCCGTTAAGTTTTTAACGTAATTTTAATAGCTTAAGATTTTAAG
AAGAAAATATGAAGACTTAGNAGAAGTNGCATGAGGAAGGAAAAGATGAAAGGTTTCTAAAACA
TGACCGGAGGTTTGGAGATGAAGCTTNTTCATGGGAGTAAAAAAATGTNTTNNAANNNGANANTT
GNGAGGANAGGGGCTACTAGAGCCCCCNNAATTNATNCCAAATTANAAAGGGNCCNGTGCTNTTT
ANNAATTAAAAATNNAAAGGGTGGACTTNAAACCNNGCTNTAAANGTNNTAAGTTTAAAAAAGTT
TGGGNGGGNGGNATTTAAAAAATAAAATNNTGGAAAGGGCGAATCCTTTTTAAAAAAANGAGAA
TTTAAACCCCCGA

| | |
|---|---|
| Sequence 1335 | cMhvSA016g03 |

CCCTTTCGAGCGGCCGCCCGGGCAGGTACACATGTCCAAGGTCAGGTCCTGGGTGGTNAAGGTAA
ATACAAATTGGAAGGGCACTGTGTGAGCCAAAATGAGTCANATTAGTCATGATTCATTTCCAGTTT
GGGTTTTGGGTGGTCTTGGAGAATGTTGNAAGCACTGCTTNATTGATAGGTTGATTGAGCCAGACT
TTACTCANCAGCCTGGAAAAGGAGAGATGGG

| | |
|---|---|
| Sequence 1336 | cMhvSA024c01 |

CCCTTTCGAGCGGCCGCCCGGGCAGGTACCCATATAAATCCCAAACCCCCAGCTCCAAAAGGAGA
TGAATAGAAGAGCAGAAGAATGCAGAGTGGCAAGGCAAAGAATGGGAGAAGAGAAGGAGCATCT
GAAAGTTGAGAGGAGTTGGGCTGGGGACGGTCCGAGAGGAGATTGGCCGCTGGATGGCCAAATTC
CAGGAGAAAAATAATCTCACTCCATCCCCCTTCCAGCTGCCCATCCACCCTGCTGAGAGCCACTTC
CATCACTCAATAAAACCCCCACATTCATCCTTTAAGTCTGTGCGACTTGACTTCCTGGATACCAAA
AAATTACCTGGGTCCCAAGAGGGCACCCGAGCTGGTTACACTTCTTCAGCTGTCTTCAGATGGCAA
ATCTAAAAGAGCACACTTGTACACACACCCACTTGGGCTTTTAAGGAAGTCACAGGCACCCACCCT
TAAGATCCTACCTTGGGGCTTGGAGCCCCAAGGCACTTCGCCTGGGGTTTGGTTGACCCTGCCCTN
TCAAGCAATGCCTCCCCTGTCCTGGCAAAAAGGGCCCTTGANNAAATTGTTGTNGGTNGGGCCCA
AACAAGATNGAGCCAAACNCCCCTTNTTCGGCACCGTTTCCTTGGCAAAAGTGNNTNAAAGGGAC
CTTTTTCCNCTTCTCCAAATNTAATTTCCCCNCCTTNCCTTTTTGGGTTTTNAA

| | |
|---|---|
| Sequence 1337 | cMhvSA032d03 |

CCCTTAGCGTGGTCGCGGCCGAGGTACGCGGGTGAGATACTCCCATCAGAATCCAAACAAAAGGA
CTATGAAGAAAATTCTTGGGATACTGAGAGTCTCTGTGAGACTGTTTCACAGAAGGATGTGTGTTT
ACCCAAGGCTGCGCATCAAAAAGAAATAGATAAAATAAATGGAAAATTAGAAGGGTCTCCTGTTA
AAGATGGTCTTCTGAAGGCTAACTGCGGAATGAAAGTTTCTATTCCAACTAAAGCCTTAGAATTGA
TGGACATGCAAACTTTCAAAGCAGAGCCTCCCGAGAAGCCATCTGCCTTCGAGCCTGCCATTGAAA
TGCAAAAGTCTGTTCCAAATAAAGCCTTGGAATTGAAGAATGAACAAACATTGAGAGCAGATGAG
ATACTCCCATCAGAATCCAAACAAAA

| | |
|---|---|
| Sequence 1338 | cMhvSA032f03 |

CCCTTTCGAGCGGCCGCCCGGGCAGGTACTTTTTTATAGAAGCCCAACTGGACTGACAGATGTCAA
GGGGTTGGGGGATCCTCAGTAGGCTAACCTAGCAGAGTTCTTGCTAAAACTGGGCTAGACAGGCC
ACAGACAAGATAGCCAAAATCAAAGCCTAGTTGAGAAGGGAATTCAGAGGAGCATGACTAAAAT
TTGGTCAAGGGGAGAGTCTTTGTCACCCCAGCACCTAGCACAAGTGGTTGGTACCTCGGCCGCGAC
CACGCTAAGGG

| | |
|---|---|
| Sequence 1339 | cMhvSA032h12 |

ACGCGGGGAGAGACAAAAACAGAAGAGGGGAAACATGTTTCCTACTGACGACAGGTGATTACAC
GTGTGCTTCTGATGGAGGGATCAGGAAAGGATATGAAAAATCCCGAAGCTTAAACAACATAGCGG
GCTTGACAGGCAATGCTCTGAGGCTCTCTCCAGTAACATCACCCTACAACTCTCCTTGTCCTCTGAG
GCGCTCTCGATCTCCCATCCCATCTATCTTGTAAACCAAACAACCAAACTGCATCAGTCGGCTAAA
TTGTATTAATTCAAGTGCTGTTTACCCCATAATGGAAATAATTAAATGTAGAGTTACTCCAGGCTC
CATTAATACAGTATAAATCTTGCATGATACTACAATTTGAA

| | |
|---|---|
| Sequence 1340 | cMhvSA033c09 |

CCCTTTCGAGCGGNCGCCCGGGCAGGTACCACTGTGCCTAGCTGAAACATCAGTTTCTGACTGAAG
TGGAGACTACAACAACTTTAGTGTTTCCCTTANAAGGATTACGGCCATGGGGAACTTGACTGAGTA
AACAATGCTATAAATAAAAAGCTCTTCCAAAACATTAACCATGGTAAGCATCATTATCCCCATAAA
ATGGTGGCATCCAGGTTAAAATGGCCCACCANGACCAAAAGTCTAAAATGGAAGATAGGAATCCA
GTCCGTTAAACTTTTTTCTGTATCTCCATCCGGGNGTGGGTCACCAAAGGGATTTACCAAATGCCTT
TCCTTTAGCATTTAAATTTCAATCCTGGGGAAAAAATTTTTAATCTCCCGTTGCCAATAATTCCCAG
TGGAGCTCTTCACCCAATACCTTATTTCCTTTTAATTTGGNGGGGGGGTCTGGCAACCGGGGGCCT
TTCCCAAAAGGANNCNAAGNAGNGGGATTAAANGNAGNAACCTTGGGTTTTTTT

| | |
|---|---|
| Sequence 1341 | cMhvSA043b04 |

CCCTTTCGAGCGGCCGCCCGGGCAGGTACCACAGACAGGCGCAAGAGGGAGGAAGAAACTATAA
ACCGAAAAAGAAACTGACAAACTTCTCTAATTGGGAATTTACATGCAGAGAGTGAGAGAAGATAC
ATCTCCCCATAAAAGGATTGAGAGGCTGTCAGATTCTCTGGCTGTGCTGTTTGGTGAAGGTCTTCC
CCTATAGAAAGCCAGTATGTAAAGATTGAGAGAGGTGGCTATTTTTCAAATGCAAAAATCACAAC
AAAAAATNACAAGGCACACAAAGAAACAGGGAAATCAGTCAAAGAAACAAAATAAATCTCCATT
AACTGACTCCGAAGAAACAGAGATCTATTAGTTACCTGAAAAAGAATTTATGATAATCTTAAAGA
AGCTCAATGTGTTTCAAGNAGAATACCAGATAGACAGCTTAAAATGGAAATCAGGCCAAACCAAA
GGCATTGAACAGGAATTGAGGGATATTGAACCCAAGNATTTNGGAAAACTTTTAAAAANAGGAAC
CCAACTTGGAAATTTCTTGGAGCCTGAANAAAAAACAACCTGGGTTTANGGAAAAAATTTNACTT
GNGGGGAAGAACCCANCCNAAGGNGGACTTTGNTCCAACCAGGGGAAAANAAATNCAGCCTTAN
CTNNAAAANGACCANAGTTCATTTTTGAAAAATTNTTTGNGNTNCNGGAGNTNACCCACCCCCCN
AAAAAAAAAAAAA

| | |
|---|---|
| Sequence 1342 | cMhvSA050c08 |

CCCTTTCGAGCGGCCGCCCGGGCAGGTACGCGGGGAGGCATTGAGGCAGCCAGCGCAGGGGCTTC
TGCTGAGGGGGCAGGCGGAGCTTGAGGAAACCCGCAGATAAGTTCTTTTCTCTTTGAAAGGATAG
AGATTAATACAACTACTTAAAAAATATAGTCAATAGGTTACTAAGATATTGCTTAGCGTTAAGTTT
TTTAACGCAATTTTTAATAAGCTTAAGATTTTTAAGAGTAAAATATTGNAATTACTTTAGAAAGGA
GTTAGCAATGGAGNGGAAAGGGAAAAAGGAATTANAAAAGGGTTTTTCTAAAAAACCATTGACC
GGGAAGGGTTTGAAGNATTGGAAAGGCNTTTCCTTTTCATTGGGAGGTTAAAAAAAAAACTGTTC
NTTTTTAAAAAAANGGNAAAAAATTTTGGANGNAGGAAAAAGGGAANTTNCCAAGGAAGCCCCC
CGGAAATTTTNATTANCCCCNAAATTACGAAAAGGGGGCCCAATTGGCCTT

| | |
|---|---|
| Sequence 1343 | cMhvSA050c10 |

CCCTTAGCGTGGTCGCGGCCGAGGTACTTTTTTTTTTTTTTTTTTTTTTTTTTTTTTTTTACNTCATTA
CTTTTTATTTTGAAAGATTTGTGAAACTNTTCACATCATGGNGAGAGTTTGTTTGATTAATAANAAN
CNNCTTTTTCATAGAAATGCTTTGGAGGTGAACNANTTCTNAGCCTNTGAGAATCCCGACCATCCC
ATTAACTTTGGAAGTTTCTCTTTGNTTAAATAGGAAGGAAACAACAGGGGGAGGGGTTGAAAAAA
AAAGGGAGGGAACCNTGCCTAAAAAACCTTNTTGACAATCATTCCCAAATGTTGAGGNAAAAGAA
ACAACCCCGGATTCACCCAAACNTCCCNCCTTTTTTTCTTATTTTTACCAACCTTTTCNTANAATTTT
CAACNTTCTTTTGNATT

| | |
|---|---|
| Sequence 1344 | cMhvSA052d04 |

GGTACGAAAGAGAGACAAAAGGGTTCTCTTGGAAACAAGAAGAGTGACTCCAGATGTGGCCTGA
ATAATTGCCATGTTAAGTTAATGCAAAAGATCAGAACAGGGCTACATTTGCACAGGCAGTTTCTCT
CCGGGCCGTAGTTTTCACTGATGATCACCTTTCACAGCATTTTCCCCAACCAAGCATTTCACTTAAG
NCTTCTCTATACCCAGCACCTCCCCCGGCACCCCCGGCAAGCCCCACTTATCACTTCCCGACTTCCA
ACGTGGGCATTCCCGTGGAGAATCTGGTCCACATTTAGGGCCGAAGCCAGGGAGAACACTTGGAG
AAGCAGCAGGGATGGGGTTTNGGAAAAAGAGCAATGCCTTTTGGGGAAACACCAGCTTTCCTGGG
GAATTTCNACATTGAGGCCAAGGTCCTTACAGAAGGAGCCAAAGAATGCACCCCCCAGGGATTTT
CTTTCNATTTTTTCTTAATTANATGTNGGGGAGGTGGCTTCNCATTTTTTCCCCCGGACANGNGGAA
ATTTTNCCCCTNGANNAAAACCGATTANCTTAGACCCCTTGGGGTTTTGGCCCCACCCTTTTGGTA
AACTTCTTTNCCTTTATCTTNCCTTNCTTTTTTTCA

| | |
|---|---|
| Sequence 1345 | cMhvSA056e12 |

GGTACTTTACCCTGCACAGATGCCCTCCTTGCCCCACTCAAGCTCCAACACCTGGAACTGAATAGT
CTTCCTGTATAGATACCCTCCCCACCCTACTTGGACTCTGGCATCTTTGTCTGGGTAGCTTTTTCCC
AAGGTGGTAGGTTGCTTGATAGGTGCTTAGTAAATATCATATTTGATTAACTTTTTGTAGCCTCCTC
TTTAGTCTAGAAATTCTAGATCCCAAATAGAAGGTAAGATATGGTATATTCTGGACTTTTAGTTTTC
TATATCTCCTTTTCAAATACAAGACCTAGGGTGACAGACAAAAAAATATTGTGATCAAAGTATATA
GCATTTNCTTTCATG

| | |
|---|---|
| Sequence 1346 | cMhvSA002e07 |

CCCTTTCNAGCGGCCCGCCCNGNCNGGNACTTNNNNNNCACNNNCNNTATGGNCTNAGAAANGNG
GGCCCCATTTTNCACCCTAGCTACAAANGGGTGAGTTTGAAAANTATGTNAGANNANCTGGANGC
TCAGGGGNCNGATNCTCTNNTGGATAANACCATTCAAAGCCAANGGTCNNGANGCCNACGAGCCC
ATACTGNTNATAAATNNNNNCCAAAAANTGNCCNTNTTNTTTGGGGNCCGCNGAGGANATNNNGC
CNTGGGGCTAACCAAAATATTAAATAGCGGTCCTTGAANGTGTACNGNGCCCNGGCGGNCGNTCC
AAAGGGCGAATTCCAACACACTTTTAAAAANTACTACCCGGATCCNNNCTCTTTTCAATNTTGGCC
TAATNANNGTTTTAGNNGTNTAANGAAGGANAANTTTTTTTNCCGGGNCTNAAAANTNGNNGGGN
TTTNNNGNAAAAAAANANTTTTTTTCCNANANANNNTTTNNTNTTNGGNNCCNCCCCAAAAAAAA
AAAAAAGGCCCNGTTTTCCCCTTGGGGGGGGGNTCNNAAAAAATCTTTCNANTTTTTTTTTTTTTTN
GAAATNAAGGNTNNNNCCCCNGNAAACCCTTNAAAAAANGGGGTTTTTTAAAAAAANCCNCCGN
GGGGGAANTNNTTTAAAATTTTAAAAAACCTTTTTAANGGGGGNGTTTT

| | |
|---|---|
| Sequence 1347 | cMhvSA003c08 |

CCCTTNGGCCGGCCGGGCAGGTACATCNGTCCCTTGACCATTACACCCACGGNGGNCCTAATTGGC
CTNTCTGGTTTCCAGGCATNNGGGGANAGAGCCTGGAAACNCTGGGGCATTGCCATGCTGNNGTG
GAAACATATCCCCTCATCCCACCACTGNGGGGCATNCTGTAGGAACATTNNCAGACTNCATGAGA
TAATGNTTNNNAATAATAACAATGGNCTGACAGTTNNAACTTTATTTGC

| | |
|---|---|
| Sequence 1348 | cMhvSA003d08 |

CCAGGTTACTTGAAATNATATGGGTATCAAAGTANCCATTGGAGAAACTTGTGGNAATGTCTNTGG
TGGNATCTGTAAAAAGAAGATTTCANCTTAGCTCATNGGGCNNGGGGCANGANGAANTANAGGA
NANTGNAATNNGGGACAGAAAAATTACNGCCTGGACTTACCAGATTGNGCTTGGCATTTTNNCGN
CTNAGNAGGGGCCCCTTNAANAATAATTTTNCTTNTCCTGGTGATTACAAGGGGNAAAAANAATT
TNGTACANAATAAGNGGAAGGGCCATAAAAATTNGGCNAANGCNTTGNCCACAAGAGGAACCAT
TTATATTANAACAANTTNANCCAGGTAAGGNTGNAAGAAATTTTGGAATNTTCCTTANAANAAAN
TTGGGTTTNTTTNATTGGGTNAAAANAAAATTANTTTTTAAAATTTTTTTTATTAACCNTCCATTTT
GGAGGTTANTTNACCAAAATAANAGTGGNANATTAATNTNCCTTCCTTTTAAAANAAATTNCCCAC
ANTTATNATTCANATTNTACTTTTTTTCCCAAANTNTTCACCACAAAAAAANTNGGGAANGTTAAN
ANAAAAAATTANTNATTGGTCTCCCTTTTTTTTNTANGGGGAATAANNAAATTGNNTCCAGGGGAN
ANTTAAANAATTGGAATTAAAATTACCACTTNCAATTANTTTC

| | |
|---|---|
| Sequence 1349 | cMhvSA004a08 |

CCCTTTCGAGCGGCCGCCCGGGCAGGTACTNTTTTTTTTTTTTTTNNCCCNCCNNANTNNCANTTNN
TTNGGNGNACNGTNAANGGNCGNGCCAAAATNAAGAAAGCACCCTTTTTTCCAANNAAAGANNN
CCATTAAAGNCCCACGTCCATNNNCNNGGGGTACTTGGNTAAAAAATAAACAAANNTTTTAACTG
GGNTTGGAAAAAAAAAAAACNNAGGGTCCCCCAGGNAAAAGGCAATNTTTTTTTTTTNTCNAAAA
AAAGCGNANGTNCCCNTAAGTTTGCCNATAAAAAAGGNAGGNCCCCNGNAAGGGNNNCCTTGNG
NGGNAAAAAACCCTNTTTTTTTAACCCTACGGGTNAAANAAANTTCANGAAATTTANNTGNNGNA
AACATGGNCTTNGNNAAAACGGGCCGGGGAAAAAAGGGG

| | |
|---|---|
| Sequence 1350 | cMhvSA004b05 |

ANAATTCGCCCTTTCGAGCGGCCGCCCGGGCAGGTACANAAAANNATGGCCTGCCAAANCTTTTTT
TTTNTTNTTCCAGGAAAAACAGGCCACAAATGAATGGTGTATTACAGATTGTACACACATGAAGA
GAAGGTAATANCGCACTGCNAAGCAGNCCGGCTCTGGGGAAGAACTTCACGGANCCCCTTCTTAG
AGCAGGGAGGGGGCTTTNTCAAANAAATGTTGAGGCTTTCTGCTGCCTNGNTCTGCCCCAGGCCCC
CCTCCAGGGTACCTCGGCCGTAACCACACTANGGGCGAANTCCNGCACACNGGCGGNCNNANCNA
CGGNATCNGATCNTGGGCCNNGACNTGNGNGAAAAAANGGCNNNANNTCCTTTCNTGGCACCAA
CTATGATGTCTTTGANAAAGATATGCTTGGGGGCCTGGGAAATTGA

| | |
|---|---|
| Sequence 1351 | cMhvSA004b11 |

CCCTTNCCAGCGGCCGCCCNGNCNGGNACTCGATNAAAAGTTTGGAGGCNTGNCACAANNNTGGA
AANAATNTAATGNTGNATTGACTNTNCAGGGTTCTATTAATGANAACACANTCNAACNANNTTTT
GATNTATTANNACAGATGTATAANNCCTATNATTTTTNAAATNAGNATCCACCTGACATTTATCTC
TCATTCCATCAGC

| | |
|---|---|
| Sequence 1352 | cMhvSA004h08 |

CCCTTAGCNTGGNCNCGGCCGACGTACTNTNTNTTTTTTTNTNNTGNTAAAGNAAGGGGNNCCNNC
CTATAAACCCNNGNNNGAATCNNNGNGGCCACCTTNGNGGNCNNNANGCTCCTANCCCNAGGGA
ANAANCCAATGTTCNGGACTNNCCCCCCCNAAAAAGGGGGNNTAANGGNCCCCCCNNCCTTCCNG
GNNNANTTNNNATTTTTTNACAAAAAANGGGNTNCCCCATTNGGCCGGGNNGGANNTAAAANNN
NAAANAAAANTTCCCCCCCCGGGANGNCCNNNAAAANGGTGGGGNNTAANAGCTGNTNNCCCNC
CCTNCCGGGGGGANNCAAAANNNCCTTTTTAGGGANGGGGCCTTCNTTTGGNCCNAANNTNTNTT
TTTGNAAAAGGCCCCTAAAATTTTTCCCANAAANCTTTTTT

| | |
|---|---|
| Sequence 1353 | cMhvSA005c05 |

NCCCTTAGCGTGGTCGCGGCCGAGGTACTACAGAGGACATAGCAGTATTAAGGGATAATGAAGTC
ACAGCTTCAGAGCCTCCATCCTTTCTTTAGCAAGTTAGCTCTACTTGTATCTGTTCTGTTTTATATAA
TATGGNTGCATCTAACTGTTTTTAAAAAAAGTTCTGTTCTTCAAAAAAATTTTAAGCTATGAAAAT
CACTGATTAAGTCAAACCCTCATTTTACAAAAGAGGCAACACAAACTCAGAGCACTTATGCCTCAC
CATAGGTCACAAAGCCAAGTANCTCCAGGCCAGAAAATGGGCTTTANGTCTTCCCGTCTGAGACT
GGCATTTG

| | |
|---|---|
| Sequence 1354 | cMhvSA008e08 |

CCCTTAGCGTGGTCGCGGCCGAGGTACCGCCCANTCTTTTACATGGTGATGGGANACACNCTTNAN
GCANACTTNANGTCTANTTNTGCCNNCATAANTNTNNCTNAACNGATTTACGGNACNCTCCNCCA
GATTTCATAATT

| | |
|---|---|
| Sequence 1355 | cMhvSA009c07 |

CCCTTAGCGTGGTCGCGGCCGAGGTACTTTTTTTTTTTTTTTTNNNANTTNNCCNTTGGCCCCCCNG
NNGGNNGNCNANGGGNGNANNCCAACCTANNGGNNANATTTNCCCCCCGGGNNAAAAAAANTNC
CCCCCCCCAANCCCCCNNNNANGGGGGNNTAANGGGNCCCCCCCCCCCCCCNAAAAAANTTTTGN
NTTTTNAAAAAAAANGGGGNTTTNCCNNNNNGGNCNNGGGGGGTTTAAAACCCNGNCCCNAGNN
NAACCCCCCNNCCNAACCNTGGGNTTTNNNTTNTTNNNNANTTTTNGGGAACCCCCNNGGGNTNN
NCNAANANTTAANNGGGTNNGGGGCCNAAAAANNGNCCCCNGGGGNNNCCCNANGGGCCTTTTA
AANGGNCCNNCCAAATTTTTTNGNAAACCCTCTTTTNNAACCCAAAANGGNCNTNAAATTAANGG
GGGNGGGGGNNCCCCAANCNTAAGANGGGGGAAAGNGNCCCTTTTACCCCNCTTTNTAAAATTTT
NTTTNAACCNGGGGCNAAAAAGNTTTTTNNNNAANGGGNANCCAAATTTTTNTNTTTTTTNNANA
AAANTTTTCCCNNGAAAAAAAAAAAAANACGNNGGGGAAAANACCCGGNGTTTAGAAAAAAAAA
AAAA

| | |
|---|---|
| Sequence 1356 | cMhvSA010b11 |

CCCTTAGCGTGGTCGCGGCCGAGGTACTTTTTTTTTGTTTTTTTTTTTTTTAAANCNTNGNAAAATNT
NTTTTTNNTNNCCCNGGANNAAACCCACCNTNTNTTAGGGNNNAAATAAANTAAANNCNNTCCNG
TTTTTNNTTTTAATCCCTTTAAAAAAGGGAANCAAAAAAAA

| | |
|---|---|
| Sequence 1357 | cMhvSA010f12 |

CCCTTTCGAGCGGCCGCCCGGGCAGGTACTTTTTTTTTTTTTTTTTTTTTTTNNNANGNCCNNAAGG
GGNAAANNNTTTTTTAAAAANCNNNTTTTNCCAAAATTTTGGNCNNAANTTCCCTTTTAANTTTNC
NNNNTNGGNAAAANGGGNTTTTNNCCNNNNAANCCTAANNTNAAGGGNCNAAATTTNTTTTNAAA
NTTNAAAAAANCCNNCNAAAAANCTTTAAAANNTTTCCCCNGGGGGCNTTTTTTCCNTNCCCCAA
AATTNTAAAAAGGGCCTNNTTTTTAAAGGAANTTTNAAAAAAGGGGGGGNCCNGATTTTTTTTNTT
TT

| | |
|---|---|
| Sequence 1358 | cMhvSA010g01 |

NGTACTGATNTNGNCTGNCNNANAGGAATGTATAATNTNAGGNCGNCCCTTATNANGCATGATGC
TTTAAANNCNTNNTACAAGTAACTTTTTAAAACNTNCCCTGAAACAANATGAGGGGACCCATT

| | |
|---|---|
| Sequence 1359 | cMhvSA012d02 |

CCCTTAGCGTGGTCGCGGCCGAGGTACTTTCCCACATTCCGGGTTGAAGAGAGCCTTTCAAAAGCA
TCAAAGATGGTTCCACAATGTTCACATGTCCACTCCTTTTATTCTCTTCTTTCGGCATGAAGTCACT
TGAGAAGGATGAATTTGTTTGGAGGAATGCTACTTTCAAATCCTATATGGGGAGGTATGATTTTTN
ATTTTTTCTAATTCTTTTCTCTTANATTAANTTTTTATCCAAAACTTTGTGAAAATGAATGGGAGCC
TAAAAAATACCTTGAAATTCTTGGGAATTCATTTCANGTCCACCCATTGGATNGNTTTTTCCCTAAA
TGGGGGGGCNTTCCCCCNAGGGGAGGCNATTTCCTTTTAATTNCNCTGAATTTATTGGAGGGGTTT
TTTTGGGTTAANCNCCAANGAAAGGGGNCTTAAAAAAACCCCAAAATTTGCCTNGGGTGGNCTTT
TTTGGCCTTANACCCTTCGGGATGGGCCCCNNGGGAANNANGGGNTTCAACCCGGGTTTTTTTANA
AAAAAANGTNGNAAAATGTCCNATTTTCCANGGGGNANTANTTTTTTGG

| | |
|---|---|
| Sequence 1360 | cMhvSA012e08 |

CGCGGGGAGGCATTGAGGCAGTCAGCGCAGGGGCTTNTGCTGAGGGGGCAGGCGGAGCTTGAGG
AAACCGCANATAANTTTTTTTCTCTTTGAAAGATAGAGATTAATACAACTACTTNCNAAAATATAG
NCAATAGGTTACTAAGATATTGCTTAGCGTTAAGTTTTTAACGTNATTTTAATAGCTTAAGATTTTA
AGAGAAAATATGAACACTTANAAAAGTAGCANTGAGGAAGGAAAAGATAAAAGGTTTCTAAAAA
CATGGACCGGAGGNTTGAAGATGAAANCTTCTTCATGGGAGTTAAAAAAATGTATTTNAAAAGAA
AAATNTGANAGAAAGGGGCTNCCAGGAGCCCCCGGAATTAAATACCAAATAANGAAGGGGCNAA
TGGCTTTTAAGATTAAAAATGGNAGGGTGACTCAAAACAGCTTAAAAGTTTT

| | |
|---|---|
| Sequence 1361 | cMhvSA012e08 |

CGCGGGGAGGCATTGAGGCAGTCAGCGCAGGGGCTTNTGCTGAGGGGGCAGGCGGAGCTTGAGG
AAACCGCANATAANTTTTTTTCTCTTTGAAAGATAGAGATTAATACAACTACTTNCNAAAATATAG
NCAATAGGTTACTAAGATATTGCTTAGCGTTAAGTTTTTAACGTNATTTTAATAGCTTAAGATTTTA
AGAGAAAATATGAACACTTANAAAAGTAGCANTGAGGAAGGAAAAGATAAAAGGTTTCTAAAAA
CATGGACCGGAGGNTTGAAGATGAAANCTTCTTCATGGGAGTTAAAAAAATGTATTTNAAAAGAA
AAATNTGANAGAAAGGGGCTNCCAGGAGCCCCCGGAATTAAATACCAAATAANGAAGGGGCNAA
TGGCTTTTAAGATTAAAAATGGNAGGGTGACTCAAAACAGCTTAAAAGTTTT

| | |
|---|---|
| Sequence 1362 | cMhvSA015a06 |

AGCGGCCGCCAGNGNGANGNNNTTCGGGGGAATNAAACCCAGCGCGGCCGCGGCCGAGGGACAG
NGNNNAAAAAGTGTACNGAAACAANAAAGCAGNCAANCAGNNAAACCCCAGAGAANNCNGCAG
AAAAAANNNATNNNCTAGNNACGGGNAGGNAACCNCACNAAAATGTGGACCGCNTNTTACCCNG
AAAGGAAAAAAACCCCCCGCANACAACCNCNACANNNCAGNCACGCAACCACAGGGCAAAGAGA
AANNAAGCTCCACNNNNAAAANANCNGAAGCAGGGGGGNAAAAGGCCCGAGNGGNCANNNNNC
NGAAANNCAGAGAAGCAANCAAAGGGCAGAANNNNGGCANNNNNCCNNANAGAAGCAGGGGGG
AGCNAAGGAGNGGCCANCAGNGAGGCACCNNGCCCCAACAGGAACCCNGGGGNAAGANAANGG
GAGGGACCGCAGCCNNGAAANANNNNCACCCCNNAAGCCACCGGGGGCNGG

| | |
|---|---|
| Sequence 1363 | cMhvSA015b10 |

CCCTTTCGAGCGGCCGCCCGGGCAGGTACAGTCAGGGTTTTGTCATGTTGTTTAGGCTGGTTTTGA
ACCCCTGGACTCAAGCAATCCACCCACCTTGGCTTCCCAAAGTGCTGGGATTATAGGCATGAGCCA
CTGCACCCAGCCAATTCTCCAAATCTCACAGCCAAACTGCAACTAAATTCCATCTCAAACAAATAT
TCAAATGCAGAAGACTCACCCATCTAATCAAGGCAGTTTTAATATTTAGGGGAAAAAAAATGCCT
GGATAAAACTGTAAAACCAAGCATGATAGAAAGAGATACTTTTAGGAATGGGGGAGGGGATGAC
AAAAATAAAACGAGAAGGTAGATAAGAATGGAA

| | |
|---|---|
| Sequence 1364 | cMhvSA016a04 |

CCCTTAGCGTGGTCGCGGCCGAGGTACTTTTTTTCTTTCTTTTTTCTTTTTTTTTTTTTTTAACAGGAA
TCAAGTAAAAACCACAGAACCTCTATATTTATATTTGAGTCTGAATCAAACATTTTCACCTGGAAG
AATTTTTTCCAAAGGAGGGGAAAACAACTGTTTCTGANTGCCTTTATTTTAGGTTAATTTTTTCAAA
AGATTATCTCTGACACCTTTGCATTAAGTATCTAATGTATTAGTGGGACTCCATGGTTTGCATTTAT
TTCTTCAATTTGCTAAAAAAAAAAAAAAGTCTACTAAAATTTCAATTTTTGAAAAGCAATTAATTA
GAATNTNTTAGATAAAGCAAAATGTAATAAACTCTTCACTTATTTTTTGGATGGAGGTCCTACTGG
TNATAAGATTTCAAGTTAAATTTTCCTAAATTGCCCTTTTTTAA

| | |
|---|---|
| Sequence 1365 | cMhvSA016b01 |

CCCTTTCGAGCGGCCGNCCGGGCAGGTACNCNGGGTGTGACCCGAGCGGTAACATCCAGAAAGGA
TTTCCNNCANANACNGCGCNGNTNNNNAGCTGCAGNTTGCCCCACCCTGATCCAGTCTCCCTCATT
TACAGCCTGGAAATTGAT

| | |
|---|---|
| Sequence 1366 | cMhvSA016d11 |

CGGGGAGGCATTGAGGCAGCCAGCGCAGGGGCTTCTGCTGAGGGGGCAGGCGGAGCTTGAGGAA
ACCGCAGATAAGTTTTTTTCTCTTTGAAAGATAGAGATTAATACAACTACTTAAAAAATATAGTCA
ATAGGTTACTAAAGATATTGCTTAGCGTTAAGTTTTTAACCGTAATTTTAATAGCTTAAGATTTTAA
GGAGAAAATNTGAAAGACTTTATAAGAGTAGCANTGAGGGAAGGGNAAAGGATAAAAAGGTTTN
TAAAAACATGAACGGGAGGGTTGAGGANGAAAGCCTTCTTCATGGGAGTNAAAAAAAAATGTTNT
TTNAAAAA

| | |
|---|---|
| Sequence 1367 | cMhvSA016d11 |

CGGGGAGGCATTGAGGCAGCCAGCGCAGGGGCTTCTGCTGAGGGGGCAGGCGGAGCTTGAGGAA
ACCGCAGATAAGTTTTTTTCTCTTTGAAAGATAGAGATTAATACAACTACTTAAAAAATATAGTCA
ATAGGTTACTAAAGATATTGCTTAGCGTTAAGTTTTTAACCGTAATTTTAATAGCTTAAGATTTTAA
GGAGAAAATNTGAAAGACTTTATAAGAGTAGCANTGAGGGAAGGGNAAAGGATAAAAAGGTTTN
TAAAAACATGAACGGGAGGGTTGAGGANGAAAGCCTTCTTCATGGGAGTNAAAAAAAAATGTTNT
TTNAAAAA

| | |
|---|---|
| Sequence 1368 | cMhvSA018f11 |

NCCTTAGCGTGGTCGNGGCCGAGGTACAGACAGGCAGGCTCCCAGTGTGAGAAGTGCCTTTAGGA
CAAGTAGAACTGCACACATAGATGCAAATGCCTGGGCCTTTCTTCAGGTTCTGTCATAGAACANAC
TGCCTGAGGCCATGCTCANGACTGCNGGCCTCAGAAACCCAGCACTTGCCCCTGCTCTGTCTTTCT
GCTCCCAGCAGCTGAATTCTAGGGAAATGTCTNTCCNTCANCCCACCCCGAGACAAACCTGCCAA
GCTNNTGGCTNTCAAATNCTTTTGCCCATGACTGANGTCCCATCANCCCTTTTCCCCAATATGAGA
ATAGCTTGTTCCACCCCTCCAAGTNCAGCAAGGCATGGGGATAACTGGAAAGGCTGTTACACCTGT
ATGCTCTCCTGCTCCCTAAGCCTGCCTCAAAACATG

| | |
|---|---|
| Sequence 1369 | cMhvSA019a04 |

CCCTTTCGAGCGGCCGCCCGGGCAGGTACCAACAGAAACAGAAATAACTGAGCAACCGAACCACC
AATAGAGCTCTTAGATTAAGAACCTTGGTTCAAGGAAGGAGTTTTGAGCAGGTGCTGGACAGAAA
GACTGAGAACTCTATGATGTAAATGAGAGCCCTGTGATAAGCCAATCAGCCTGCTGTGGCCTGGA
ACTGATTGATCATGGGCCAGGAAGGAGCACAGAGGGGTAACCTGGCAAAGAACAAAGGAAGAGG
TAGCCACTGGCGGAGAATGACTAGGACAGAAGANGCCCAGAAGAGAGCTAGGACTGGGAATCAA
ATTTACATATGGATGTCTAAGAAAACTTTANGTTCACAATGAGGCTTCTTNTTANGCATAACCTGC
AGATGATCAAGAATGCTTTTTTTTGCTTGGTTGGNTTCTAAAT

| | |
|---|---|
| Sequence 1370 | cMhvSA019d08 |

CCCTTTCGAGCGGCCGCCCGGGCAGGTACACTCTTTCTTGGTCATGTGGCTTCCCTGTTTCTTCACA
ATTGCAGCTACATTCCCTCTCAATGCTCTGAAAGTGTGGGTGCCTCTCCCCCTTTAGTTCTGGCTGT
AGACAGTGGTTTGGCACTCCTSGGCTGTCTACTGCAGCTCTGGGTGATCAATCTAATGTTTATGTTC
CTTCCCCAGCTTGTTTGCAGCAGAGGAAGGAACCTTAGTAGTGGTCATGGCCAANGGTCCCTTGCT
CATCTCCTGGGGACTCCACTCTAGAGATACACAGGTCAGCAATTGTTTTGGTGCAATCAAGCCTAG
GGATGGAGGGTCTGTNCTGTGGGCCCAAACCAAGGGGGTCCCTGTCTGATGATNAANCAATGGAA
GGGTTGTTGTGGNAACCACATTNGGNANAGGGGACNTGGCCTTCTTTCTCCCTTGGGGNTTGAATT
GCANCCCNTGTTTGGAAAGTGGTGGGATNAAAANGCACCGTTGGGGGNCTTTTGATTCTTTTNGNT
AANNCCCTGNAANGGGTAANCCAAAANAACNANTTNTACTTGCAAAAANGCAATTGGGGCANA
AAAAAGGGTTTTT

| | |
|---|---|
| Sequence 1371 | cMhvSA021g07 |

CCCTTAGCGTGGTCGCGGCCCGANGTACTNTTTTTTTTTTTTTTTTTTTTTGTCTGGGTGGTGACAGC
TCATGATAATTCATAAAGTTGTATACTATGATTTGTGCATATTGGATANATACGTCATAGTTCACTT
TAAAAGTTT

| | |
|---|---|
| Sequence 1372 | cMhvSA023d02 |

CCCTTTCGAGCGGCCGCCCGGGCAGGTACAATTCCAGGAGCTTCCCTGTAATTCCTCAAAAAAGCA
CTAGTAAAACTCTTAGGAGGATATTAGATAAAGCTCACTTAGCAATAGCCCTTTTTCCCCACATAT
TCTGGAAGGTTCTATAAAAGCTATTAGATACTCATTCCTGGTTCTGGAAAATTAAATAAGCCAATT
CTTGGTAGGATTTTCCAAANGGCTTACCACAGGAGGGATTTTATNCCTCNTTTTTGAAAAATATTTT
CATCCCATTAANAGNAATAAGGAAANCTTCTTGCCCTTTCAATAAGCCATTTTTNANAGGCCTTTC
CTGGTTATTTTTNNTTGGGGGACCAAAAAAAAATTNGTTCTTANAAACCAAGNAAANTTTAAGAAT
TCTTTCCCAGGGGTCCTTCAAAAAAAGGCCACCAAAGGANGNANTATTTATTCCAANGGAGGAAA
AAATTCTTTGGGAAGNTTAAAAACCNCAAAAACCAAAAAAAATTCTTGNTANAAAAATGGTGGGN
GAAAAATTGGTACAATTTCTTCCCTTTTCC

| | |
|---|---|
| Sequence 1373 | cMhvSA023h11 |

CCCTTTCGAGCGGCCGCCCGGGCAGGGACTTATTTATATTTTATTTNTNNCATTGNNTNTTTAAGGN
TTGNNATTGNANTNANTTTNNAANTNAATTNTAACTGTTTNCNGNTTTTTCAATGTGTTTATNTANT
NCATCNGATTTTGNACTNANCGAGCCTNCACAATTATGTCAAAAAGCTAATATGTTTGAGAACCAT
CTATTTAAAGAACAGCAAGTTTGGACCAANAAATAAAGACCAACGGTGAAAGCANGCAANCCCC
AGAAATAACTAGNAAAANTGCTNAAAAGGAGGAACCTTTTACTTNATANGANAATNAAACCATTT
GACNGNAAAACTTTTTTNAACACTAANATTTNTATNTTTTTNAAANNNACCTTTTTTTTT

| | |
|---|---|
| Sequence 1374 | cMhvSA024h04 |

CCCTTAGCGTGGTCGCGGCCGAGGTACTTTTTNTCTTTCTTTTTTCTTTTTTTTTTTTTAACAGGAAT
CAAGTNAAAACCACAGAACCTCTATATTTATATTTGAGTCTGAATCAAACATTTTCACTTGGAAGA
ATTTTTTCCAAAGGGGGGGAAAACAACTGNTTCTGAGTGCCTTTATTTTAGGTTAATTTTTTCAAAA
GATTATCTCTGACACCTTTGCATTAAGTATCTAATGTATTACGTGGGACTCCATGGGCTGCATTTAT
TTCTTCAATTTGCTAAAAAAAAAAAAAAGNCTACTAAAATTTCAATTTTTGAAAAGCAATTAATNT
GAAATATNTTAGATAAGCNAAAATGTAATAAACTCTTNCACTATTTTTTTG

| | |
|---|---|
| Sequence 1375 | cMhvSA027g09 |

ACCGNGCCTGCCTNTCAAGATACCCCATCCTCTCCACGCCGCTGCCGCTGCCGCCATGCAAGGGGA
GGACNCCNGATACCTCAANAGGTGACGACTCCCCAACGGCTCTGTCCTACCCTCCTTGCCAGGGCC
CTGAAGATGNTCTTGGGTTTGCTGNGAGATGTCACNTGGGCAAACGCTTAGCTTATTCACTACGGG
ATGGGGAAAGCNNGGAGAGTAAGTTCACTCGGAATAGGGAGGAGGGGAAAAGGTGAANATGGGN
CAAAAAAANGAGNAGCNTNTGGGGGGGTTTTNAAAAGTCCCTTTGACCTTGAACTCGGCGNNATC
CCCNTTTCAGCCTTTGANAAAGATNGGGGTTCCTTTCCGCTTANCANTCAACCCTTTAATTNANCA
AGNGNGNGAAGAAGGGGAAGGNTTANNTGGCCAANNGGTAAAAACCCCCCCGCNCCTTTTTGNTT
TTT

| | |
|---|---|
| Sequence 1376 | cMhvSA031d05 |

CCCTTAGCGTGGTCGCGGCCGAGGTACTTTTTTTTTTTTTTTTTTTTTNNNCCCCTTTTTTTTTTTTTT
TTNCNNNAANNTNNTTNAAAAANNAAAAANNNNTTTNCCCAAAAAAANNAANNCCCNGGGGAAA
NGGGGCCNGGGGGNANAANTTAAAAAANANTTTNAANCCCNNCCCCCNNTTTNNNTTTAAAAATN
TTNNANNGGGGGCNNNCCNTNTCANACCTTGCNNCTGGGNTTATNAATTTACTGCCNTTCCATTGT
ATTGAGGTCCCTGAANTCNTGGATNACCAGAAANGGGGANTTTTAANATTNCATTNAAT

| | |
|---|---|
| Sequence 1377 | cMhvSA033f08 |

ACTTCATGAACGCCAGGAAAGCCTTCAGGCTATCCTCAACAGAATGGAGGAGGTTCACAAGGAGG
CAAACTCTGTGCTGCAGTGGCTGGAATCAAAAGAGGAAGTCCTGAAATCCATGGATGCCATGTCA
TCTCCAACCAAGGACAGAAACAGTGAAAGCCCAAGCTGAATCTAACAAGGCCTTCCTGGCTGAGT
TGGAACAGAATTCTCCCAAAAATTCAAAAAAGTTAAAAGGAAGCCCTGGCTGGATTTACTGGTGG
ACATATCCCAACTCACAGGGAAAAAAGNATTANAATGCTTTNTGGTTACCTTGGCCCGCGGACCC
ACCGNCTAAGGGGCGAAATTCCAGCACACTGNGCGGCCCGTTTACTAGTGGGATCCCGAGGCTCG
GTTCCAAANNCTTTGGGCCGTAAATCANTGGNTCANTAGCTTGTTTTNCTGNTGGNGAAAAATTNG
TTTATTCNCCGCTTCACCAAATTTCCCCCACCAACCATTAACCGANGCCCCGGGNAAAGGCCATTA
AAAANGTGGTTAAAAGCCCCTGGG

| | |
|---|---|
| Sequence 1378 | cMhvSA034a02 |

CCCTTTCGAGCGGCCGCCCGGGCAGGTACATTGAAGCTGCTTAAATAACCCAGTATCTGAAAAGCT
GTCCTCTTAACATTGCATTAATAACAATATAAGCTCAATTTTAAATGATGAAATATTTCACCCTCCC
TAGTTTCTGATTTTGGCCTCTGGAGTAATNTTAACTTGATCAGTAAACACACACATTACATACATAC
ATTATTACACACACCAAAGGTTTCATTCATTATTTAAGCAAGGAGAATCGGATTACCCCTTGTGTT
AATTNATNATTAAGGAAAANTTCCAAAAAAAGGTCNAAACCTCCAGTTAGGCNATGNCTTAATGG
AAAANTAANCTAAGTNATTTCAAANAATCCAAAAAGGGTGGGAAAAAATTTCAAGCCCANCTTGG
GGGGGNACCCCTTGAAAAAGGGGTTTCCCTTCACTTTTCCCCTTAAGNAAATTATTATTAACCATTT
TTGGGAAA

| | |
|---|---|
| Sequence 1379 | cMhvSA034b07 |

CCCTTAGCGTGGTCGCGGCCGAGGTACTGCTCGGAGGTTGGGTTCTGCTCCGAGGTCGCCCCAACC
GAAATTTTTAATGCAGGTTTGGTAGTTTANGACCTGTGGGTTTGTTAGGTACGCGGGGGGAGTCTN
CAGGATGGCACCGGACCCCTGGTTCTCCACATACGATTCTACTTGTCAAATTGCCCAAGAAATTGC
TGAGAAAATTCAACAACGAAATCAATATGAACGAAAAGGTGAAAAGGCACCAAAGCTTACCGTG
ACAATCAGAGCTTTGTTGCAGAACCTGAAGGAAAAGATCGCCCTTTTGAAGGACTTATTGNTAAG
AGCTGTGTCAACACATCAGATAACACAGCTTGAAGGGGGACCGAAAACAGAACCTCTTTGGATGA
TCTTGTANCTCGAGAGAGACTACTTTCTGGCCATTCTTTAAGAATGAGGGTGCCGAACCAGATCTA
ATCAGGTNCAGCCTGATTAGTNGAAGAGGCTAAACNAGNAGNANCNAAACCCTTGGCTTTTTTTA
GGGNGCCCNCNGGAAGACCNAGAAGGCTTTGGGTTTTGATTAAAATNCGGGCAACAAGNAGGCA
GAAAAAATTNTTCNAAANAACAAGGATGCCAAGCCCTTTGATNCCCCTTTTCCTTTTATNNAAAAA
NGTTGGCCANAAAANAAAATTGGGGGGCAAGGNAAATTTGGGGAATTTNAATTTGGGATTNAACC
AAAAATGAGNANTAANTTTNGNCCNNCCTTNCCCAACCTTTTGGGNNNAAAACANAATTNAAAAA
ATTTT

| | |
|---|---|
| Sequence 1380 | cMhvSA041e12 |

CCCTTAGCGTGGTCGCGGCCGAGGTACTTTTTTTTTTTTTTTTTTTTTTTTTANNGGGNTNNNNNNTT
TTCCCCNGGGNNGTTTNAAANNNNNGGGCNNAAANAAANNCCCNAANNAANCCNTTAAAANGNN
GGGNANNANNGGNNAAAANNAANNCNAANGGCCCNANNNNNTTTTTTTTNAAACCAAAAANNNT
TTAAAAAAAAAAAANNTTTTTTTTTTAANNAAAANTAAANCCCNGAANGGGNTNCCTTTTTNCCCC
CGGGGNNNNGAAAAAAAACNCCTTANNNCCNTTNANACCCNGTTTTCCCTTNGCCCCCCCAAATT
TCAAAAN

| | |
|---|---|
| Sequence 1381 | cMhvSA045f05 |

CCCTTTCGAGCGGCCGCCCGGGCAGGTACTTTTTTTTTTTTTTTTTTTTTTTTATTTNCAATGCTTCGT
TTCTAGCTATTCTGTGCTCATTTCCACCTGAAAGANAAAATAATACTATCTATAGCTGAGATTCATA
TTATGGAATAGTAATTTATTCTATATCTGTAACTTTTAAAAAGTCATAATTACATCAATGCACATGT
AAGTTAAGGGAGTTATTTGTTTTTCAAAGAAGGCGTCCACAGTTCGACTTTAAATAAGTTGNGTAG
GAACACTACATCTGTTCTCAAGGGATTCCACCAAATACTTTTTGGTGCTTCCTTTAAAACTGCCACC
AGAGCCACTTTACAAGGTATAAACAGGGTTTGGGAGGCCCTATATTATACCTCATTTTCACCCAAA
CGTATTGCCCTTTGCATTTT

| | |
|---|---|
| Sequence 1382 | cMhvSA045h03 |

CAATTTTGGAAAATTCCCGCAAGNTAAANCGNTTTTCAGGGAGATTTATNTCGNTTTAATACCCCC
NTAGCGAGGNCGNGGGCGATGTACAANAACTANNTGGTTGTGGTGGCGCTCGCCTGTAGNCCCAG
CTACTCGGGAGGCTGAGGCAGGATAATTGCTTGAACCTGGCANGCAGAGGTTGCAGTGAGCCGAG
ATCGCAGTCACTGCACTCCAGCCTGGCGACAGAGCGAGACTNCGCCTNGGGAAAAAAAAAAAAA
ATCCTTAACAGCTGAGAATGGCTAGAGTTTAGGCGCTGCACACTGGCAAGCAGCTCCTTTGACCCC
AGGCACTTNACTCCTCATTTNTCTCTNAACAAGGCAGCCAGCAAGGATCCTGGAGTCACAGGGTGT
GAGATGCGAAAAAA

| | |
|---|---|
| Sequence 1383 | cMhvSA051e01 |

AGGTACCAACTGGGACCGTTGAAACTGTTTAGCCTTTGTGGCAAGAAATTCCGATTTCATTTCAAC
TCCTGCTTGTTGTAGAATTGACTTTGCCACAGGTCCAACTGTAATATCATGTGGGTTTACAGAATTA
ACAATTACATCTGCCGTCTGCCATTCAATGTGGCCCTGGACAATCTGGAGGGTCAGGTTGTTCACG
ACCATTGCATTGAAAGAAGGGGTGGTTTCTTGTCCCAGCTCACTCTTCCCTAGGATGAATTCTGAA
GCAGCTTTAAAGGCAGCAACAGTAGGGTCCTCATTGCTCACCAGGTGAATTTCTTTCAAATTACTC
ATCATTGGCTTCCTTGCAAACTAACCCGGATAGTCTCTACAATAGTCTTTGTACCTGCCCGG

| | |
|---|---|
| Sequence 1384 | cMhvSA052c03 |

NCCCTTTCNAGCGGCCGNCCGGGCAGGNNCANNTTCACTCACATGTGGCTCTNGGNTGTATTCNGN
AGNGGGCATCNTGACCCACATGATCAAATGCCCCAGAGTTCACTCTNTNTNTGAAGAGCTCCGTGT
CTACTAAGAGGTCTGATTCCCTACATGCNGGCCAGTATGTNGGAATGAAATGTGTCACTAANCGTN
AAAATAANGCACTAGCAAATNCAGAACCTTGAAAAGTNAAACTNATNCCNNCCAAGGGCTTNATT
TTTCAGGGGCC

| | |
|---|---|
| Sequence 1385 | cMhvSA055c11 |

CCCTTTCGAGCGGCCGCCCGGGCAGGTACGCGGGGAGGCATTGAGGCAGTCAGCGCAGGGGCTTC
TGCTGAGGGGGCAGGCGGAGCTTGAGGAAACCGCAGATAAGTTTTTTTCTCTTTGAAAGATAGAG
ATTAATACAACTACTTAAAAAATATAGTCAATAGGTTACTAAGATATTGCTTAGCGTTAAGTTTTT
AACGTAATTTTAATAGCTTAAGATTTTAAGAGAAAATATGAAGACTTAGAAGAGTAGCATGAGGA
AAAAAAAAAAAAAAAAAAAAAGGTACCTCGGCCGCGACCACGCTAAGGG

| | |
|---|---|
| Sequence 1386 | cMhvSA055c11 |

CGCTCACAATTCCCACACAACATACCGAAGCCGGAAGCATTAAAGTGTAAAAGCCTG

| | |
|---|---|
| Sequence 1387 | cMhvSA055d08 |

CCCTTACCAGCGGCCGGNCNGACNGNCACTTNNNNNCACTGNNGGGGNCCATTGTNACTGNCANG
GAATACTTGAAAGGTCANGTAACTNACACTTCTGGAGAGACCATTCAAGGCTTGTGNCTNTTGACA
AAAANAGACCANTNGNGCAATGAAAAGGAGAGAATTCT

| | |
|---|---|
| Sequence 1388 | cMhvSA001e01 |

CCCTTAGCGTGGTCGCGGCCGAGGTACACAGAACTTGAAATTTGCAAAAGAAGGAGA

| | |
|---|---|
| Sequence 1389 | cMhvSA002a05 |

CCCTTTCGAGCGGCCCGCCCGGGCAGGTGCTTTTTTTTTTTTTTTT

| | |
|---|---|
| Sequence 1390 | cMhvSA002f10 |

TTCCCTTAGCGTGGTCGCNGCCGACGTACACNTGGACCTGCTGGCATTCGAGGNCCTCANGGTCAC
NAAGGCCCTGCTGGCCCCCC

| | |
|---|---|
| Sequence 1391 | cMhvSA004c04 |

ANAATTCGCCCTTAGCGTGGTCGCGGC

| | |
|---|---|
| Sequence 1392 | cMhvSA009h05 |

ACATTCATGTTAATCCAGGGAGCAAGGTAAAGCTGTCACTTTCATTATTCACATGACCACGAAAAT
AAATTGTATTTTTTTTTTTT

| | |
|---|---|
| Sequence 1393 | cMhvSA013c02 |

CCCTTACCAGCGGCCGNNCCGACNGNCNCAATTACTNCTATTTNNAATNTACNAAGGANCAAACA
NCTACAGGATTNAGGNCGGACCGAATGGGT

| | |
|---|---|
| Sequence 1394 | cMhvSA014d07 |

AGCGTGGTCGCGGCCGAGGTNCATNCTAACAAANATGAAATNCTATGTTAAATCTACTAACNCTTT
GCCTGCCA

| | |
|---|---|
| Sequence 1395 | cMhvSA019b03 |

CCCTTTCGAGCGGCCGCCCGGGCAGGTACTTTTTTTTTTTTTTTTTTTTTTTTTACGGNTTTTATTTTT
NAATTTTTATTTTGGTTTTCTTACAAAGGNNGACATTTTCCATAACAGGTGTAAGAGTGTTGAAAA
AAAAAATTCAAATTTT

| | |
|---|---|
| Sequence 1396 | cMhvSA021h04 |

GGTATGCTTGACCNTAGNGCTANCATCTTCTTTACAATTTNNANAAGGCAGAGGATGAAGACNAA
CCAAGAGGCTACTGNCATTGAATTT

| | |
|---|---|
| Sequence 1397 | cMhvSA023d09 |

AGGGAGGAAAGGGANAAANANATGACAANAGCAAGACACAAGAAATGCAGCAATAAGCACACA
NNACTCACACACTGACNCTAATCTGGNGCAGGCCATCCTCTTAC

| | |
|---|---|
| Sequence 1398 | cMhvSA026c06 |

CCCTTCGAGCGGCCGCCCGGGCAGGTACTTTCTTTTTTTTTTTTTTTTTTTTTTATTTTTTTTTTTTTTT
TTTTTTTTTTTTTTTTTTTTTTTTTTTTTTTTTTTTTTTTTTTTTTTTTTTTTTTTGGGGNAAAAAGGGTT
TTTNTTTTCCCCCNNNTTCCNNCNTTTTATTTTTTTT

| | |
|---|---|
| Sequence 1399 | cMhvSA031f12 |

CCCTTTCGAGCGGCCGCCCGGGCAGGTACTTTTTTTTTTTTTTTTTTTTTTTTTTTTCCCNTTAAAAA
AANNACNTCCAATNGNNNTCAACCNNGGGNAAAAAAGGGGNNGGGGGTNTTTTAAGGGGAAAAA
NNAAAAAAAAAAAAAGGGTTTTTT

| | |
|---|---|
| Sequence 1400 | cMhvSA032c04 |

CCCTTTCGAGCGGCCGCCCGGGCAGGTACATGTGCATGTTTTTACATGGGTATATGGCATACTGGC
GGGGACTGGGCTTCTAGTGTATCTATTCCCCAGCTAGTGAACATTGAACCTATAGGTAATTTTTCA
ACCCTTGCCCCCCTCCCCACTCTCCTCGCTTTTGGCATTCCCAGTATCTATTATAAGGCTTGGGTTTT
AATATACCTGCTTCTGCACTGAGTCTGTGGACCAGGGTACCTCGGCCGCGACCACGCTAAGGG

| | |
|---|---|
| Sequence 1401 | cMhvSA032f08 |

ACTTTTTTTTTTTTTTTTTTTTTTAAANCCNNNAAAAAAAAAAAAANTTTCCCNATTTTTTTNNNAG
GGGTTTTNTGGNNANNGGGNAANNNGGGGGNTTNGGNNNNNNNAANNNTTNNNNCCCNNNNTTT
NAANTTNCCCNGGNNNAAANAANGNAACCCCCNNNTTTNAAANNAAAAAAAAAANG

| | |
|---|---|
| Sequence 1402 | cMhvSA032h03 |

CCCTTAGCGTGGTCGCGGCCGAGGTACTTTTTTTTTTTTTTTTTTTTNGCCNNAAANGGGGGNAANG
GGGGNNNTNNNGGGAAAAANCNGCCCCTTTTTAAAAA

| | |
|---|---|
| Sequence 1403 | cMhvSA033g03 |

CCCTTTCGAGCGGCCGCCCGGGCAGGTACTTTTTTTTTTTTTTTTTTTTTTTTGANNNCCNNCCNNNA
ANNAAAANAANNNTTTTGGGNCNNAANTTTTTTNNNNNTTAAAAAAAAANAAACNNAAANTTTN
AAAAANANNCCNNTNTNTTTTTTTTTNNGGGGGGNNNAAAAAAAAAAA

| | |
|---|---|
| Sequence 1404 | cMhvSA044b10 |

ACCCTTGCCTTTGAATNATTTATATNCTNATNTTTCTTGNNCCCAGACTTTGTCCTTCANTGCACTG
AGTCAAAGCTTTACACTA

Sequence 1405 cMhvSA048f10

CCCTTTCGAGCGGCCGCCCGGGCAGGTACTTTTTTTTTTTTTTTTTTTTTTTTTTGGTTTTTTTTTTTTT
TTTTTTTTTTTTTTTTTTTTTTTTTTTTTTTTTTTTTT

Sequence 1406 cMhvSA007h11

CCCTTTCGAGCGGCCGCCCGGGCAGGCACTTTTTTTTTTTTTTTTT

Sequence 1407 cMhvSA009d02

CCCTTTCGAGCGGCCGCCCGGGCAGGTACTTTTTTTTTTTTTTTTTTT

Sequence 1408 cMhvSA010e01

CCCTTTCGAGCGGCCGCCCGGGCAGGTACTTTTTTTTTTTTTTTTTT

Sequence 1409 cMhvSA018b01

CCCTTTCGAGCGGCCGCCCGGGCAGGTACTTAGTTTTTTTTTTTTTTT

Sequence 1410 cMhvSA032f11

CCCTTTCGAGCGGCCGCCCGGGCAGGTACTTATATTTTTCTTTTTTTTTTTTTTTTTG

Sequence 1411 cMhvSA037a06

CCCTTTCGAGCGGCCGCCCGGGCAGGTACTTTTTTTTTTTTTTTTTTTTTTTTTTTT

Sequence 1412 cMhvSA037d04

CCCTTTCGAGCGGCCGCCCGGGCAGGTACTTTTTTTTTTTTTTTTTTTTTT

Sequence 1413 cMhvSA037f01

CCCTTAGCGTGGTCGCGGCCGAGGTACTTTTTTTTTTTTTTT

Sequence 1414 cMhvSA040g04

CCCTTAGCGTGGTCGCGGCCGAGGTACCTTTTTTTGTTTTCCTTTTTTT

Sequence 1415 cMhvSA041d06

CCCTTAGCGTGGTCGCGGCCGAGGTACTTTTTTTTTTTTTTTTTTT

Sequence 1416 cMhvSA041f04

CCCTTTCNAGCGGCCGCCCGGGCAGGTACTTTTTTTTTTTTTT

Sequence 1417 cMhvSA037b05

CCCTTAGCGTGGTCGCGGCCGAGGTACTTTTTTTTTTTTTTTTTTTNGGGNAAAAAAAATTTNNNTT
TTTNCCCCNNGNNNGNNNGNNNNGGGGCCNTNNAAATTTNNTNGNNCCCCCCCCCCCCCNTTTAA
AAAAATTTTNNNNCCNTANCCCCCCAAATTATNNGGNTTAAAAGGNTTTGCCNNNNTCCCNGGGN
NNTTTTTTTTTTTTA

What is claimed is:

1. A method of assessing whether a patient is afflicted with breast cancer, the method comprising comparing:
a) the level of expression of one or several breast cancer marker genes in a patient sample, and
b) the normal level of expression of one or several of said marker genes in a sample from a control subject not afflicted with breast cancer,
wherein at least one of said marker genes is selected from the group consisting of the genes listed in Table 1 and a significant difference between the level of expression of one or several of said marker genes in the patient sample and the normal level of one or several of said marker genes is an indication that the patient is afflicted with breast cancer.

2. The method of claim 1, wherein several of said breast cancer marker gene is selected from the group consisting of the genes listed in Table 1.

3. The method of claim 1, wherein at least of one of said marker genes encodes a secreted protein.

4. The method of claim 1, wherein the sample comprises cells obtained from the patient.

5. The method of claim 4, wherein the sample is a breast tissue sample.

6. The method of claim 5, wherein the cells are in a fluid selected from the group consisting of blood fluids, breast fluid, lymph fluid and urine.

7. The method of claim 1, wherein the level of expression of said marker genes in the samples is assessed by detecting the presence in the samples of a protein encoded by each of said marker gene or a polypeptide or protein fragment comprising said protein.

8. The method of claim 7, wherein the presence of said protein, polypeptide or protein fragment is detected using a reagent which specifically binds with said protein, polypeptide or protein fragment.

9. The method of claim 8, wherein the reagent is selected from the group consisting of an antibody, an antibody derivative, and an antibody fragment.

10. The method of claim 1, wherein the level of expression of said marker genes in the sample is assessed by detecting the presence in the sample of a transcribed polynucleotide encoded by each of said marker genes or a portion of said transcribed polynucleotide.

11. The method of claim 10, wherein the transcribed polynucleotide is an mRNA or hnRNA.

12. The method of claim 10, wherein the transcribed polynucleotide is a cDNA.

13. The method of claim 10, wherein the step of detecting further comprises amplifying the transcribed polynucleotide.

14. The method of claim 1, wherein the level of expression of said marker genes in the samples is assessed by detecting the presence in the samples of a transcribed polynucleotide which anneals with each of said marker genes or anneals with a portion of said transcribed polynucleotide, under stringent hybridization conditions.

15. The method of claim 1, wherein said significant difference comprises an at least two fold difference between the level of expression of one of said marker genes in the patient sample and the normal level of expression of the same marker gene in the sample from the control subject.

16. The method of claim 15, wherein said significant difference comprises an at least five fold difference between the level of expression of one of said marker genes in the patient sample and the normal level of expression of the same marker gene in the sample from the control subject

17. The method of claim 1, comprising comparing:
a) the level of expression in the patient sample of each of a plurality of marker genes independently selected from the genes listed in Table 1, and
b) the normal level of expression of each of the plurality of marker genes in the sample obtained from the control subject,
wherein the level of expression of at least one of the marker genes is significantly altered, relative to the corresponding normal level of expression of the marker genes, is an indication that the patient is afflicted with breast cancer.

18. The method of claim 17, wherein the level of expression of each of the marker genes is significantly altered, relative to the corresponding normal levels of expression of the marker genes, is an indication that the patient is afflicted with breast cancer.

19. The method of claim 18, wherein the plurality comprises at least three of the marker genes.

20. The method of claim 19, wherein the plurality comprises at least five of the marker genes.

21. A method for monitoring the progression of breast cancer in a patient, the method comprising:
a) detecting in a patient sample at a first point in time the expression of one or several breast cancer marker genes;
b) repeating step a) at a subsequent point in time; and
c) comparing the level of expression of said marker genes detected in steps a) and b), and therefrom monitoring the progression of breast cancer;
wherein at least of said marker gene is selected from the group consisting of the genes listed in Table 1.

22. The method of claim 20, wherein at least one of said marker gene encodes a secreted protein.

23. The method of claim 20, wherein the sample comprises cells obtained from the patient.

24. The method of claim 20, wherein the patient sample is a breast tissue sample.

25. The method of claim 20, wherein between the first point in time and the subsequent point in time, the patient has undergone surgery to remove breast tissue.

26. A method of assessing the efficacy of a test compound for inhibiting breast cancer in a patient, the method comprising comparing:
a) expression of one or several breast cancer marker gene in a first sample obtained from the patient and exposed to the test compound; and
b) expression of one or several of said marker genes in a second sample obtained from the patient, wherein the second sample is not exposed to the test compound,
wherein at least one of said marker genes is selected from the group consisting of the genes listed in Table 1, and a significantly lower level of expression of one of said marker genes in the first sample, relative to the second sample, is an indication that the test compound is efficacious for inhibiting breast cancer in the patient.

27. The method of claim 26, wherein the first and second samples are portions of a single sample obtained from the patient.

28. The method of claim 26, wherein the first and second samples are portions of pooled samples obtained from the patient.

29. A method of assessing the efficacy of a therapy for inhibiting breast cancer in a patient, the method comprising comparing:
a) expression of one or several breast cancer marker genes in the first sample obtained from the patient prior to providing at least a portion of the therapy to the patient, and
b) expression of one or several of said marker genes in a second sample obtained from the patient following provision of the portion of the therapy,
wherein at least one of said marker genes is selected from the group consisting of the genes listed in Table 1, and a significantly lower level of expression of one of said marker genes in the second sample, relative to the first sample, is an indication that the therapy is efficacious for inhibiting breast cancer in the patient.

30. A method of selecting a composition for inhibiting breast cancer in a patient, the method comprising:
a) obtaining a sample comprising cancer cells from the patient;
b) separately exposing aliquots of the sample in the presence of a plurality of test compositions;
c) comparing expression of one or several breast cancer marker genes in each of the aliquots; and
d) selecting one of the test compositions which alters the level of expression of one or several of the marker genes in the aliquot containing that test composition, relative to other test compositions;
wherein at least one of said marker gene is selected from the group consisting of the genes listed in Table 1.

31. A method of inhibiting breast cancer in a patient, the method comprising:
a) obtaining a sample comprising cancer cells from the patient;
b) separately maintaining aliquots of the sample in the presence of a plurality of test compositions;
c) comparing expression of one or several breast cancer marker genes in each of the aliquots; and
d) administering to the patient at least one of the test compositions which alters the level of expression of one or several of said marker genes in the aliquot containing that test composition, relative to other test compositions,
wherein at least one of said marker genes is selected from the group consisting of the genes listed in Table 1.

32. A kit for assessing whether a patient is afflicted with breast cancer, the kit comprising reagents for assessing expression of one or several breast cancer marker genes, wherein at least one of said marker genes is selected from the group consisting of the genes listed in Table 1.

33. A kit for assessing the presence of breast cancer cells, the kit comprising a nucleic acid probe which specifically binds with a transcribed polynucleotide encoded by a marker gene selected from the group consisting of the marker genes listed in Table 1.

34. A kit for assessing the suitability of each of a plurality of compounds for inhibiting breast cancer in a patient, the kit comprising:
a) the plurality of compounds; and
b) a reagent for assessing expression of one or several breast cancer marker genes, wherein at least one of said marker genes is selected from the group consisting of the genes listed in Table 1.

35. A method of making an isolated hybridoma which produces an antibody useful for assessing whether a patient is afflicted with breast cancer, the method comprising:
immunizing a mammal using a composition comprising a protein encoded by a gene listed in Table 1 or a polypeptide or protein fragment of said protein;
isolating splenocytes from the immunized mammal;
fusing the isolated splenocytes with an immortalized cell line to form hybridomas; and
screening individual hybridomas for production of an antibody which specifically binds with said protein, polypeptide or protein fragment to isolate the hybridoma.

36. An antibody produced by a hybridoma made by the method of claim 35.

37. A kit for assessing the presence of human breast cancer cells, the kit comprising an antibody, wherein the antibody specifically binds with a protein encoded by a gene listed in Table 1 or a polypeptide or protein fragment of said protein.

38. A method of assessing the breast cell carcinogenic potential of a test compound, the method comprising:
a) maintaining separate aliquots of breast cells in the presence and absence of the test compound; and
b) comparing expression of one or several breast cancer marker gene in each of the aliquots,
wherein at least one of said marker genes is selected from the group consisting of the genes listed in Table 1, and a significantly altered level of expression of one or several marker genes in the aliquot maintained in the presence of the test compound, relative to the aliquot maintained in the absence of the test compound, is an indication that the test compound possesses human breast cell carcinogenic potential.

39. A kit for assessing the breast cell carcinogenic potential of a test compound, the kit comprising breast cells and a reagent for assessing expression of a gene listed in Table 1.

40. A method for determining whether breast cancer has metastasized in a patient, the method comprising comparing:
a) the level of expression of one or several breast cancer marker genes in a patient sample, and
b) the normal level or non-metastatic level of expression of one or several of said marker genes in a control sample
wherein at least one of said marker genes is selected from the group consisting of the genes listed in Table 1, and a significant difference between the level of expression of one or several of said marker genes in the patient sample and the normal level or non-metastatic level is an indication that the breast cancer has mestastasized.

41. The method of claim 40, wherein several of said marker genes are selected from the genes listed in Table 1.

42. The method of claim 40, wherein at least one of said marker genes encodes a secreted protein.

43. The method of claim 40, wherein the sample comprises cells obtained from the patient.

44. The method of claim 40, wherein the patient sample is a breast tissue sample.

45. A method for assessing the aggressiveness or indolence of breast cancer comprising comparing:
a) the level of expression of one or several breast cancer marker gene in a sample, and
b) the normal level of expression of one or several of said marker genes in a control sample,
wherein at least one of said marker genes is selected from the marker genes of Table 1, and a significant difference between the level of expression of one or several of said marker gene in the sample and the normal level is an indication that the cancer is aggressive or indolent.

46. The method of claim 45, wherein several of said marker genes are selected from the group consisting of the marker genes listed in Table 1.

47. The method of claim 45, wherein at least one of said marker genes encodes a secreted protein.

48. The method of claim 45, wherein the sample comprises cells obtained from the patient.

49. The method of claim 45, wherein the patient sample is a breast tissue sample.

50. An isolated nucleic acid molecule comprising a nucleotide sequence of Table 1.

51. A vector which contains the nucleic acid molecule of claim 50.

52. A host cell which contains the nucleic acid molecule of claim 50.

53. An isolated polypeptide which is encoded by a nucleic acid molecule comprising a nucleotide sequence of Table 1.

54. An antibody which selectively binds to a polypeptide of claim 53.

55. A method for producing a polypeptide comprising culturing the host cell of claim 52 under conditions in which the nucleic acid molecule is expressed.

56. A method for detecting the presence of a polypeptide of claim 52 in a sample comprising:
a) contacting the sample with a compound which selectively binds to the polypeptide; and
b) determining whether the compound binds to the polypeptide in the sample to thereby detect the presence of a polypeptide of claim 53 in the sample.

57. A kit comprising a compound which selectively binds to the polypeptide of claim 53.

58. A method for detecting the presence of a nucleic acid molecule of claim 50 in a sample comprising:
a) contacting the sample with a nucleic acid probe or primer which selectively hybridizes to the nucleic acid molecule; and
b) determining whether the nucleic acid probe or primer binds to a nucleic acid molecule in the sample to thereby detect the presence of a nucleic acid molecule of claim 45 in the sample.

59. The method of claim 48, wherein the sample comprises mRNA molecules and is contacted with a nucleic acid probe.

60. The method of claim 48, wherein the sample is isolated from ovarian tissue.

61. The method of claim 48, wherein the sample is a tumor sample.

62. A kit comprising a compound which selectively hybridizes to a nucleic acid molecule of claim 50.

The application's sequence listing, which the Patent Office published only in electronic form, follows.

SEQUENCE LISTING (1417 sequences)

SEQ ID NO: 1 - DNA, 831 bp, Homo sapiens
  misc_feature 20, 22, 415, 457, 465, 638, 668, 669, 715, 750, 783, 786: n = A,T,C or G
actatagggcgaattggagntncccgcggtggcggccgaggtaccggagacaggtgcagtccctcacctgtgaagtggatgcccttaaaggaaccaatgagtccctggaacgccagatgcgtgaaatggaagagaactttgccgttgaagctgctaactaccaagacactattggccgcctgcaggatgagattcagaatatgaaggaggaaatggctcgtcaccttcgtgaataccaagacctgctcaatgttaagatggcccttgacattgagattgccacctacaggaagctgctggaaggcgaggagagcaggatttctctgcctcttccaaacttttcctccctgaacctgaggggaaactaatctggattcactccctctggttgatacccactcaaaaaggacacttntgattaagacggttgaaactagagatggacaggttatcaacngaaacttntcagcatcacgatgaccttgaataaaaaattgcacacactcagtgcagcaatatattaccagcaaggaataaaaagaaatccatatcttaaagaaacagctttcaagtgcctttctgcagttttttcaggagccgcaagatagattttggaataggaaataagctctagtttnttaacaacccgacacttctacaagatttannaaaaaagtttaccaacaataatctaagtttacagaaaaaatcttgngctataaatactttttaaaaagggattttgaatanccattaaaaactgccttttttttttccagcaangtnttcaaccaactttgggttctggtttaataaaatttttggaaaaaa

SEQ ID NO: 2 - DNA, 895 bp, Homo sapiens
  misc_feature 1, 24, 30, 52, 55, 357, 503, 514, 527, 529, 531, 570, 613,614, 621, 623, 627, 640, 646, 664, 671, 673, 678, 691, 693,695, 698, 700, 712, 719, 731, 734, 740, 744, 745, 749, 751,763, 766, 770, 787, 789, 790, 795, 799, 801, 808, 809: n = A,T,C or G
  misc_feature 819, 823, 825, 832, 844, 847, 856, 857, 858, 859, 870, 871,873, 874: n = A,T,C or G
nggcgaattggagctccccgcggnggcggncgaggtacacagtcagtgtggntgncttgcacgatgatatggagagccagcccctgattggaacccagtccacagctattcctgcaccaactgacctgaagttcactcaggtcacacccacaagcctgagcgcccagtggcaccacccaatgttcagctcactggatatcgagtgcgggtgacccccaaggagaagaccggaccaatgaaagaaatcaaccttgctcctgacagctcatccgtggttgtatcaggacttatggtggccaccaaatatgaagtgagtgtctatgctcttaaggacactttgacaaagcagaccagctnaagggagttgtcaccactcttggagaatgtcagcccaccaagaaagggctcgtgtgacaagatgcttactggagaccaccatcaccattagctggagaaccaagactgagacgatcactggcttccaaagttgatgccgttccaanccaatgggccnagacttcaattcnananaaaccattaagccagatgtcagaagcttccccattacangtttacaaccaggcccttgctacaaagaatctaccctgtcccnngggccgntntagnaactagggggatncccccnggcctgggagggaatttngattttnanccttnttcgattacccgncnanccntntagggggggggncccgganccccaccttttnttncctttnttgnngggntnaatttggggggnttngggnaaataatgggaataaantnnttccntggngnaaattgnnttcccctccnattncnaaaaaanaaaaaccggggnaanaaaaagtannnnggggggggccnnannggccccccccccccccccccc

SEQ ID NO: 3 - DNA, 864 bp, Homo sapiens
  misc_feature 542, 613, 637, 640, 642, 643, 664, 666, 688, 700, 713, 715,722, 734, 740, 742, 743, 753, 754, 762, 764, 765, 774, 776,785, 787, 788, 790, 792, 797, 798, 833, 838, 847: n = A,T,C or G
ccccgcggtggcggcccgaggtacaacaaagcaatgttaccttaccataggccttaattcaaactttgatccatttcactccaatgacgggagtcaatgctacctgggacacttgtatttgtaaattctgatttagcttattgtagacttgtgcctactttgtcatgagggtttgacttctgcattcttcgtggctttccttcctttggcttaggtttgctaaagctagaagattcaattgctctttacagacttatgaggaagatagactttgtaacgcagatgtcacttctcatgccaccctgccctggttagctcttctggaggaatactgcagataagaaaaatagttatttgggaggctccctcaagtgtggtaggaattgagactaacacaattttggttaaagtccactgaggtatgagtttatagaactccactgtatgtatccagctatactaaaacattttgccaagacactggaggactctttcattatctactgggaaagaataagacttagaggctttttaataagttnctgggattgggtggggtaaaaatcatggagttaaaaaaagacttggggggagaaaggaaaacctgttaaangttacatttaattttggaatttcnccncnnttgtcaaccttacttacaggntncaatggccaaataaaaagttanaaaaagtttggnagaaatgctttcnangtttttnaaaagaaccaanggaccntnngccccctttnnaaaaaaananngaacccccncncggccgggnanntntntttanncttttttttccccccccccccctggggggggggcncggcnccccttttnttccctttttggggggg

SEQ ID NO: 4 - DNA, 524 bp, Homo sapiens
  misc_feature 358, 365, 368, 386, 391, 404, 408, 414, 484, 524: n = A,T,C or G
ccgcggtggcggccgaggtactccaggccgggactcaggttatcaaaagtgcaggagctctgatcagcatggaccacttcttccaaagaatttccctgctggccgtttgtaggggttgtggtaattctataaccagtaatgtctggggtggtgctcctctcccaggagactgtgagcactccagtgtcagggtttgcctccagatgcaagtttgttggtggagacaatggtgtcaccactttgtttacaattggcgcatctctttcctgtccatctctcaggacttggatggtgtagacgtattctactcctggagtcaagccggacacaacgatgctttctgagtctgaaagtcacnttttcgnggngcctttccttccctggcnttggnccgaaccctcggnccgnttttanaacttagtggaatcccccgggcttgcaaggaaattcaatatcaaaccttatccgatacccgtcaacctcnagggggggggcccggtacccaaccttttgttccctttaan

SEQ ID NO: 5 - DNA, 658 bp, Homo sapiens
  misc_feature 384, 390, 455, 505, 553, 554, 584, 589, 614, 621, 622, 624,630, 632, 634, 638, 641, 643, 650, 656: n = A,T,C or G
ttagggcgaattggagctccccgttgtggcggccgaggtactgtggatatttaaaatatcacagtaacaagatcatgcttgttcctacagtattgcgggccagacacttaagtgaaagcagaagtgtttgggtgactttcctacttaaaattttggtcatatcatttcaaaacatttgcatcttggttggctgcatatgctttcctattgatcccaaaccaaatcttagaatcacttcatttaaaatactgagcggtattgaatacttcgaagcagaacaggcaatgtgcagccctcatttatgagaaaaccctcaggaaactcccagggtgatgcttggagaagctgtgagttgagctgaagctggagaactttcctccaganccaaanggctttaagaaaggaaaggaagaactcttaacctgggttctgcttaacatcactccaagtttaanaatgggatcttggccagaaaagaccatgcctttgttcctctggaattggnaaaagaatgatttactctccgggaatcttctctgtcaacctgtacctnncccgctctaaaactagttggatcccccggncttcnaggaattccatatcaaaccttatcnatacccnncnacctcnangngggnccngntacccancttttntt

SEQ ID NO: 6 - DNA, 508 bp, Homo sapiens
  misc_feature 485, 497: n = A,T,C or G
aatacgactcactataggggcgaattggagctccccgcggtggcggccgaggtacccagaagtgtcctggaatggggcccatgagatggttgtctgagagagagcttcttgtcctacattcggcgggtatggtcttggcctatgccttatgggggtggcccgttgtgggcggtgtggtccgcctaaaaccatgttcctcaaagatcatttgttgccaacactgggttgctgaccagaagtgccaggaagcttaataccatttccagtgtcatacccagggtgggtgacgaaaggggtcttttgaactgtggaaggaacatcaagatctctggtccatgaaaattggggtgtggaagggttaccaattggggaaagctcgtctgtctttttccttccaatcaagggctcctcttctgattattcttcagggcaatgacataaattgtatattcggttcccggttccaggccagtaataatagcctntgtgacaccaanggcggggccca

SEQ ID NO: 7 - DNA, 361 bp, Homo sapiens
  misc_feature 16, 48, 54, 65, 91, 93, 94, 95, 116, 121, 127, 134, 137,140, 145, 146, 156, 162, 163, 193, 210, 222, 232, 234, 295,296, 303, 306, 309, 313, 325, 337, 345: n = A,T,C or G
cctgccgacgtacttntgaacaattatctcctcctgatcactatttcntacttngctttaaaaanccaaagttcacaaagagagggggagnannngggggacttttattccaatanaaaanatggantaagttntanggnagaannttgttcagtncggatnnaaatctctatgaaaagtaaattccttgatnactggtatgactataantctctgttatcngatacgaggnanaaactgcaagctgactagcatgttctgagaatcagccattcctaaaaattttataaacacnngatactntanacngganaatgggaccgcncccaataaacanatatttgngaaaaatgcatccaca

SEQ ID NO: 8 - DNA, 687 bp, Homo sapiens
  misc_feature 115, 161, 464, 630, 649, 683: n = A,T,C or G
actcctatagggcgaattggagctccccgcggtggcggcccgaggtactcatccctactgttatagctggagaggatttgggtattgaagcagggaggggcagatcccacgaatngactgcagatctggaataataagtaagggggtagatctgcccatanagctcactttaaccggcctatactcctacaaggaattggggtagggatcttctactcagccttgccacaatagaatggccaatgcccttctagtatgtttggtgaaggtcttgaaggcccatttcccccatccaccctgggggagaaattgagtccctaaagtcaacgacaaggcttattgaggctgagtttgcaacagatcccgatctgggaggtagaaacaaaaatgactgaacatctttttatcccccaatcgttacaaagcctaaataactctaaacgggatgggagggcaaattttangtcaagttgacatcctggagaaaatatcctaggtcctgtctcattccctagaccgcataacactccaacccgtgtaaatctcaaggacccttgaaaaagacagtgggtaggggaagaaggaaggggagctagctttccaacctactccacacttgacttcccatangacaaccagtaagtgtaangggcatttgcaaaatcaagtggaaagtccttggncgct

SEQ ID NO: 9 - DNA, 573 bp, Homo sapiens
  misc_feature 508: n = A,T,C or G
cgaggtaccggagacaggtgcagtccctcacctgtgaagtggatgcccttaaaggaaccaatgagtccctggaacgccagatgcgtgaaatggaagagaactttgccgttgaagctgctaactaccaagacactttggccgcctgcaggatgagattcagaatatgaaggaggaaatggctcgtcaccttcgtgaataccaagacctgctcaatgttaagatggcccttgacattgagattgccacctacaggaagctgctggaaggcgaggagagcaggtagggaactcagacttggatgcgtgaactaatggtgaccatttgttaggccctgtgccactgggctctaagcagtgtcacatttaatctttagaaagtttctttgaggtaactgctttccactttttgtagaggaggaatttgaattgagagagagtaagtgacttgctgaaaaagggttaatcaacagcagagctgggatttgaacccataactctgtcaaagcctncactcctaactcctgttcatgctctgtggagaaaatgcttgtagtacatattttaaatgtacctt

SEQ ID NO: 10 - DNA, 290 bp, Homo sapiens
  misc_feature 2, 5, 7, 8, 9, 12, 15, 18, 20, 29, 32, 37, 39, 43, 45, 49,51, 54, 60, 65, 71, 75, 79, 87, 90, 91, 99, 101, 111, 114,115, 116, 117, 118, 126, 130, 133, 136, 137, 177, 180, 265: n = A,T,C or G
gntcncnnntgncgnaantntatatagcnctnatctntncggnancacntncangggggnccccngcaccnactnttcntacccttnatnnagggttantngcacgcttgnccnnnnnatggacanactntanttnntgagctcactggatatcgagtgcgggtgacccccaagganaanaccggaccaatgaaagaaatcaaccttgctcctgacagctcatccgtggttgtatcaggacttatggtggccaccaaatataaantgagtgtctatgctcttaaggacac

SEQ ID NO: 11 - DNA, 373 bp, Homo sapiens
  misc_feature 137, 238, 242, 254, 274, 333, 343: n = A,T,C or G
ggagctcccccgcggtggcggccgaggtactcagaagtgtcctggaatggggcccatgagatggttgtctgagagagagcttcttgtcctacattcggcgggtatggtcttggcctatgccttatgggggtggccgntgtgggcgggtggtccgcctaaaaccatgttcctcaaagatcatttgttgcccaacactgggttgcttgaccagaagtgccaggaagctgaataccatttncagngtcatacccagngtgggtgacgaaaggggtcntttgaactgtggaaaggaacatccaagatctctggtccatgaagattggggtgtggaanggttaccagntggggaagctcgtctgtctttttccttcca

SEQ ID NO: 12 - DNA, 516 bp, Homo sapiens
  misc_feature 161, 185, 216, 342, 354, 361, 363, 386, 410, 422, 441, 454: n = A,T,C or G
cgactcactataggggcgaattgggagctcccccgcggtggcggcccgaggtacctgttcgcattgcagaatataaaacttggtttacactctataaaaaataaccaatatccaaattcaagagagctagcattcacagaacacacaatatgggtgtgtanctactgttcaccagcctcaggctngatttaaacaaacaaacaaaaaaaaaatttnaaagggatcattcaagatgaccgtataatgcttgctgctgtctttgcaaattaaggtttgcttttcaagtgcatgattttaacataaggcctgggctctctgcacctagtgaggtgtgaggctctnttgcccacagtncacactntnacttaactaagccagagttgggnggcattattaaattatcactggtnttcttaatagtnaaaatgggggaacccaganggcaggaaatttncattccctatatttggggctaaacctaaaagagtatatccctttcaaagagcttaagtgcct

SEQ ID NO: 13 - DNA, 52 bp, Homo sapiens
  misc_feature 4, 32, 44: n = A,T,C or G
tganggaattcgatatcaaagcttatcggttnccggccacctcnaggggggg

SEQ ID NO: 14 - DNA, 765 bp, Homo sapiens
  misc_feature 47, 55, 63, 64, 68, 71, 84, 87, 88, 91, 93, 94, 110, 115,126, 156, 167, 176, 197, 203, 204, 211, 217, 219, 225, 230,236, 238, 239, 240, 253, 272, 277, 282, 284, 285, 290, 294,298, 303, 309, 312, 366, 408, 494, 536, 576, 591, 611: n = A,T,C or G
  misc_feature 645, 705, 711, 729: n = A,T,C or G
cgcggtggcggccgaggtaccggagacaggtgcagtccctcacctgngaagtggntgcccttnnaggnacnactgagtgcctgnatnnccngnntccaccaagaggtgcnacctncaacatcatantgctggtaactaccaagacactattggccngcctgcaggangagattcanaatatgaaggaggaaatggcncgtaanntttgagnataccnanacctgnttaanggttanannncccttgacattgncaatgccacctacgggaanctgtnggaangnnagganagcnaganttttntgcctnttncaaacttttctcccttgaacctgaggggaaactaatctggattcacttccctcnggttgatacccactcaaaaaggacacttttgattaagacggntgaaactagaagatggacagggttatcaacgaaacttctcaacatcaccgatgaccttgaataaaaattgcgcaccctcagtgcangcaatatatttccagcaagaataaaaaagaaattccatatcntaaagaaacagctttcaatgcctttctgcagttttttcanggagccgcaagattnattttgggaatagggaattnaagcttttagtttcttaacaaaccgacacttctnaccaagatttaataaaaaaagtttcaaccttaatcttagtttaacagaaaaaatcttggngcttanaatactttttaaaaaggnatttttggaatcttattaaaaactggtttttttttt

SEQ ID NO: 15 - DNA, 444 bp, Homo sapiens
  misc_feature 284, 429, 442: n = A,T,C or G
ccgcggtggcggccgaggtacgatatacgaagactctgagctgtttgcctccgatgggtttccaagtattttgcccgttgtaagctcattaagggccaacttttactttcaatatgtgattctgcagaattaatttaaggaggcgctgatcatgctgagagtatcaatcagaaaaatgcatttattcacaggtgccagcaaagtgtattctccatctggcctcaaaacagatgcccagcctaattgggccacaaagatcccgtgaaggtggttttgctggtttncaagccagctcaataacttggtttggcagaatcaaggaattaaggacctgatcaatcaaatgggatcacaccattatttgtcacaatatccctttttggtcaccattttgaattccattaactggtatactgtcaccgtcacatnctatctcaattgnat

SEQ ID NO: 16 - DNA, 507 bp, Homo sapiens
  misc_feature 11, 26, 145, 403: n = A,T,C or G
attggagctcnccgcggtggcggccnaggtcctgttcgattgcagaatataaacttggtttacctctataaaaataccatatcaaattcaagagagctagcatccagaacaccaatatgggtgtgtagctctgtcaccacctagnttgatttaaacaaacaaacaaaaaaaaaatttcaaagggatcattcaaagatgacccgtataatgcttgctgctgctttgcagattaagggttgcttttcaaagtgcatgattttaacataaggcctgggctctctgccctagtgaggtgtgaggctctcttgccacacagttcacactctacttaactaagccagagttggtggcattattaaattatcactggtcttcttaatagtaaaaaatggggaacccaganggcaggaaatttccattaccctatattggggctaaacttaaaaagagtatatccactatcaagagcttagtcctcggccgctctagaactaagtggatcccccg

SEQ ID NO: 17 - DNA, 456 bp, Homo sapiens
  misc_feature 2: n = A,T,C or G
tnctatagggcgaattggagctccccgcggtggcggccgaggtactgtggatatttaaaatatcacagtaacaagatcatgcttgttcctacagtattgcgggccagacacttaagtgaaagcagaagtgtttgggtgactttcctacttaaaattttggtcatatcatttcaaaacatttgcatcttggttggctgcatatgcttttcctattgatcccaaaccaaatcttagaatcacttcatttaaaatactgagcggtattgaatacttcgaagcagaacaggcaatttgcatcttggttggctgcatatgctttcctattgatcccaaaccaaatcttagaatcacttcatttaaaatactgagcggtattgaatacttcgaaagcagaacaggcaaatgtgcagccctcatttatgaagaaaacccttagggaaacttccaggggtgatg

SEQ ID NO: 18 - DNA, 307 bp, Homo sapiens
  misc_feature 87, 95, 126, 136, 143, 153, 157, 181, 185, 186, 192, 195,200, 210, 212, 220, 232, 233, 237, 242: n = A,T,C or G
tccccgcggtggcggccgaggtacagtcctgattgcatcataattgtggtttccaacccagtggacattcttacgtatgttacctgnaaactaantggattacccaaacaccgcgtgattggaagnggatgtaatntggattntgctctatancacnaccttatgcgctgagaaacttgancatnnatcccnccntggtnacatggatgnantatggctnaacccaacctanngatnactcntgctttgacccctacacgaatgtctgaatcaggctttaaactgttgtgccagtgcttaggctttg

SEQ ID NO: 19 - DNA, 133 bp, Homo sapiens
  misc_feature 116: n = A,T,C or G
gggcgaattggagctccccgcggtggcggccgaggtacacagtcaatgtggttgccttgcacgatgatatggagagccagcccctgattggaacccagtccacagctattcctgcnccaactgacctgaagtt

SEQ ID NO: 20 - DNA, 421 bp, Homo sapiens
  misc_feature 113, 124, 141, 169, 192, 196, 210, 223, 231, 242, 243, 258,260, 273, 276, 281, 283, 292, 295, 298, 307, 331, 332, 334,339, 340, 342, 343, 344, 345, 350, 352, 356, 357, 359, 366,369, 373, 381, 402, 407: n = A,T,C or G
ttagggcgaattggagctcaccgcggtggcggccgaggtacgtcacgcagggcagcacgtgaggtcaaggcttggaaacatccacatagatttggacatgctgttcctgaatntgagcctgcanctcctggatttcctctncgtggagtttcttcaaaaaggcaatctnttcttgcaaagattccactttgngttnaaaggccaagaacntgccaaaagaccnaatttgtnaacaatcctgnncttgaaaagaattgnanggtggttttcggnttnctctntntgaagcatntgnctnctgcaattnctcccggaggcgcatgatgacctnngncaggnngnnnngctcnanctcnncncgggctntgncgantggttagntggtccacctgcccgggcggncgctngactctagaactag

SEQ ID NO: 21 - DNA, 513 bp, Homo sapiens
  misc_feature 23, 24, 30, 34, 38, 43, 44, 46, 51, 52, 55, 65, 68, 73, 78,81, 82, 83, 84, 88, 90, 93, 104, 105, 107, 109, 113, 122,123, 124, 125, 129, 130, 131, 132, 133, 134, 135, 139, 141,143, 145, 146, 147, 149, 150, 152, 155, 161, 162, 172: n = A,T,C or G
  misc_feature 178, 182, 184, 185, 186, 191, 192, 193, 200, 203, 205, 213,215, 216, 219, 220, 224, 225, 230, 231, 234, 237, 239, 242,245, 246, 251, 254, 258, 260, 262, 265, 266, 267, 269, 270,272, 273, 274, 277, 292, 307, 310, 315, 318, 320, 321: n = A,T,C or G
  misc_feature 350, 370, 379, 393, 410, 443, 465, 477, 494, 502: n = A,T,C or G
ccgcggtggcggccgaggtacannaactgnttgnatanctagnntntcatnntgngaggtaatancancaaanctaantcnnnnaaananctnatgtgcattannantnggtngaatgtcannnnaatnnnnnnnagtntngnannnanntnacnatcaanntacaaagtgncttgangccngnnnggccnnntgcacantgnantgacaatncnngcnnctgnnctgannttnttnangantcnnctggnatngatncncnatnnnanntnnnttncctggccaccacacncaataccttgctggnatnatggnagncnncacgtgccaggattaccggctacatcatnaagtatgagaagcctgggtntcctcccanagaagtggtccctnggccccgccctggtgtnacagaggctactattactggcctggaaccgggnaaccgaatatacaatttatgtnattgtcctgaanaataatcagaaagagcnagcccctnattggaaggaa

SEQ ID NO: 22 - DNA, 371 bp, Homo sapiens
  misc_feature 5, 17, 24, 43, 46, 51, 54, 60, 65, 66, 75, 81, 86, 88, 89,99, 108, 110, 112, 139, 142, 144, 146, 148, 153, 157, 162,169, 173, 188, 195, 207, 223, 224, 227, 233, 236, 251, 253,272, 279, 283, 284, 293, 295, 297, 300, 303, 316, 327: n = A,T,C or G
  misc_feature 329, 330, 342, 359: n = A,T,C or G
gcggnggcggccgaggnccatttntacggggagacaaaacccnaancccgnganacccangcaannacgacgaancgctgnttacngnnaacgggaagnaaccgcccncnanaaaaaagacaaagaaccaggcgcatanacnanananggggngggnccaangcccatntgtncagggccctttttcngaaaacngggcaccacaangaaaaaccccagcacnnggnagaacnggnacaaaaagaccagcngnggacagaaaacgacggcgncaaaagnaagnngcccagggnananganaanggaaggaaggaanggccgcccagnannagggcccaaggnccaagaggacgggacancgggcagcgagg

SEQ ID NO: 23 - DNA, 823 bp, Homo sapiens
  misc_feature 529, 584, 622, 633, 646, 661, 685, 691, 712, 713, 725, 731,763, 798: n = A,T,C or G
cgaggtaccggagacaggtgcagtccctcacctgtgaagtggatgcccttaaaggaaccaatgagtccctggaacgccagatgcgtgaaatggaagagaactttgccgttgaagctgctaactaccaagacactattggccgcctgcaggatgagattcagaatatgaaggaggaaatggctcgtcaccttcgtgaataccaagacctgctcaatgttaagatggcccttgacattgagattgccacctacaggaagctgctggaaggcgaggagagcaggatttctctgcctcttccaaacttttcctccctgaacctgagggaaactaatctggattcactccctctggttgatacccactcaaaaaggacacttctgattaagacggttgaaactagagatggacaggttatcaacgaaacttctcagcatcacgatgaccttgaataaaaattgcacacactcagtgcagcaatatattaccagcaagaataaaaaagaaatccatatcttaaaagaaacagctntcaaagtgcctttctgcagttttttcaggagccgcaagataagatttgggaatanggaataaagctctagtttcttaacaaccgacactcctncaaagatttantaaaaaaaagttnaccaacattaatctnattttacaaaaaaaaatctttggngcctanaaatacctttttaaaaaaggnntttttgaaatanctattnaaaactggtttttttttttttccaagcaagtnttccaacccaacttgggttctggcttaaaaaaaanttttgggaaaaaaaaaaaaaaaaaa

SEQ ID NO: 24 - DNA, 817 bp, Homo sapiens
  misc_feature 431, 488, 572, 670, 679, 691, 693, 697, 731, 734, 748, 764,772, 805: n = A,T,C or G
cgaggtaccggagacaggtgcagtccctcacctgtgaagtggatgcccttaaaggaaccaatgagtccctggaacgccagatgcgtgaaatggaagagaactttgccgttgaagctgctaactaccaagacactattggccgcctgcaggatgagattcataatatgaaggaggaaatggctcgtcaccttcgtgaataccaagacctgctcaatgttaagatggcccttgacattgagattgccacctacaggaagctgctggaaggcgaggagagcaggatttctctgcctcttccaaacttttcctccctgaacctgagggaaactaatctggattcactccctctggttgatacccactcaaaaaggacacttctgattaagacggttgaaactagagatggacaggttatcaacgaaacttctcancatcacgatgaccttgaataaaaattgcacacactcagtgcagcaatatattaccancaagaataaaaaagaaatccatatcttaaaagaaacagctttcaagtgccttttctgcagttttttcaaggagccgcaagatangattttggaataggaataaagcttttagtttttttaacaaacccgacacttcctacaaggaatttagaaaaaaaggttttaccaaccattaatcttangttttacangaaaaaatcttngngctnagaattcttttttaaaaagggtatttttggaatnctntttaaaaaacctgntttttttttttttccngcaaggtnttccaacccaactttgggtttttgctttcaaanaaaaaaaaaaaa

SEQ ID NO: 25 - DNA, 639 bp, Homo sapiens
  misc_feature 362, 417, 495, 533, 536, 537, 552, 622, 628: n = A,T,C or G
aggtactgtggatatttaaaatatcacagtaacaagatcatgcttgttcctacagtattgcgggccagacacttaagtgaaagcagaagtgtttgggtgactttcctacttaaaattttggtcatatcatttcaaaacatttgcatcttggttggctgcatatgctttcctattgatcccaaaccaaatcttagaatcacttcatttaaaatactgagcggtattgaatacttcgaagcaagaacaaggcaatgtgcagccctcatttatgagaaaaccctcaggaaactcccagggtgatgcttggagaagctgtgagttgagctgaagctggagaacttcctccagagcaaagggcttangaaaggaaaagaagaactcttaagctggggtctgctaacatcactccagtttaanatggatcttggcagagaagacattgcctttgttcctcctgggattgggaaaagaatgaatttactcttccgggaaatntttcttttggtcaaccctggtaccttcgggcccgcttnttnnaaacctaagtgggantccccccccgggctggccaggggaatttccaattatccaaagccttttattcgattaccccgccgaaccntccaangggggggggcc

SEQ ID NO: 26 - DNA, 652 bp, Homo sapiens
  misc_feature 372, 413, 420, 429, 438, 445, 447, 454, 458, 459, 466, 469,470, 475, 490, 492, 493, 509, 514, 515, 517, 518, 520, 522,545, 546, 549, 562, 570, 571, 572, 574, 575, 578, 579, 580,583, 586, 587, 588, 590, 595, 596, 597, 598, 599, 642: n = A,T,C or G
aggtacaggctgacagagaagattcccgagagtaaatcatctttccaatccagaggaacaagcatgtctctctgccaagatccatctaaactggagtgatgttagcagacccagcttagagttcttctttctttcttaagccctttgctctggaggaagttctccagcttcagctcaactcacagcttctccaagcatcaccctgggagtttcctgagggttttctcataaatgagggctgcacattgcctgttctgcttcgaagtattcaataccgctcagtattttaaatgaagtgattctaagatttggtttgggatcaatagggaaagcatatgcagccaaccaagatgcaaatgttttgaaatgatntgaccaaaattttaagtggggaaaagtccccccaaaccttngtgtttnaaaataaanagggggggnggccccnantttttgnaaannaaccaancanngattntttggggggggggtnanntataaaaaaaaaaaanccccnngnncncnggggttaaaaaaaaaaaaaaaanntanccccccccccccncggggggnnngnnaannnaanttnnnanttttnnnnncccccccccccccccggggggggggggggggggggcccccccncttttttttt

SEQ ID NO: 27 - DNA, 605 bp, Homo sapiens
  misc_feature 365, 407, 417, 423, 425, 426, 429, 439, 440, 443, 445, 453,455, 461, 466, 473, 475, 476, 484, 485, 490, 491, 504, 505,515, 517, 518, 522, 525, 529, 537, 538, 540, 542, 545, 548,550, 551, 552, 557, 558, 559, 560, 586: n = A,T,C or G
ccgggcaggtacacctgttgtcattcaacaagaaaccactggcaccccacgctcagatacagtgccctctcccagggacctgcagtttgtggaagtgacagacgtgaaggtcaccatcatgtggacaccgcctgagagtgcagtgaccggctaccgtgtggatgtgatccccgtcaacctgcctggcgagcacgggcagaggctgcccatcagcaggaacacctttgcagaagtcaccgggctgtcccctggggtcacctattacttcaaagtctttgcagtgagccatgggagggagagcaagcctcttgactgctcaacagacaaccaaactggatgctcccactaacctccagtttggtcantgaaactgattctactgccctggggggagaagggacttcccntggggccaanaataanannatnccgattggannggngntctttacnanaagagncccanccccaancnntccctggnncaaannaaaaaaaaataanncccccccccngnnggcntgnaaangaaatttnnantnttnaancnnnaaccnnnncccggggggggggggggggggggggnccccttttttttttttttt

SEQ ID NO: 28 - DNA, 624 bp, Homo sapiens
  misc_feature 326, 372, 398, 400, 401, 410, 411, 415, 428, 435, 436, 449,450, 453, 454, 457, 474, 475, 476, 478, 489, 491, 494, 506,512, 514, 516, 517, 518, 519, 523, 526, 534, 562, 570, 573,574, 575, 576, 577, 581, 582, 583, 589, 590, 591, 593: n = A,T,C or G
  misc_feature 596, 597, 598, 599, 600, 602, 603, 604, 605, 606, 608, 609,611, 612: n = A,T,C or G
aggtacaggctgacagagaagattcccgagagtaaatcatctttccaatccagaggaacaagcatgtctctctgccaagatccatctaaactggagtgatgttagcagacccagcttagagttcttctttctttcttaagccctttgctctggaggaagttctccagcttcagctcaactcacagcttctccaagcatcaccctgggagtttcctgagggttttctcataaatgagggctgcacattgcctgttctgcttcgaagtattcaataccgctcagtattttaaatgaagtgattctaagatttggtttgggatcaatangaaagcatatgcagcccaaccaagatgcaaatgttttgaaatgatntgaccaaatttttaagtagggaaagntnnccccaaacnnttgnggtttttcaattnaagtggnngggccccgccctnntgnnaanaaaaaaaaaacaaaaannntnggggggggggnanatnattaaaaaaaanaaaacnancnnnncccnggncccctaanaaaaaaaaaaaaaaaacccccccccccngggggggnggnnnnnaatnnnattttnnntnttnnnnncnnnnngnngnngggggggggggg

SEQ ID NO: 29 - DNA, 311 bp, Homo sapiens
aggtacttggaaatgtgagatggctgtggtgcattccactggatggggtgggagttgggctgactcggagtctcagtgataaatacttcgacaggaccacttgagcttggataggtctgtaaaggttggcaatgccactccccaatgccacggccatagcagtagcaccggtatctgacaccatgcacatacttctcccatgaatctccaatttgataaaacgtcccagtctctgaatcctggcattggtcgacgggatcacacttccacctgccccgaccctgaccgaagcatgtacctcggccgctcta

SEQ ID NO: 30 - DNA, 276 bp, Homo sapiens
  misc_feature 44, 94, 121, 146, 165, 167, 174, 196, 204, 216, 217, 237,270: n = A,T,C or G
cctgtgtgaaaattgtttatcccgctcacaatttccacaacaanattacgagcccggggaagccataaaagttgtaaaagccctgggggtgccntaaattgaagtggagctaacctcacanttaaatttgcggtttgcggcttcancttggcccgctttttccangncgggggnaaaaccttgtccggtgccccancctgcaanttaattgaaatnnggcccaaacgccccgggggnagaggcgggtttggggtattggggggggttttntcggtt

SEQ ID NO: 31 - DNA, 412 bp, Homo sapiens
  misc_feature 60, 61, 62, 64, 65, 66, 67, 68, 72, 77, 78, 82, 83, 84, 85,87, 90, 93, 95, 96, 98, 102, 103, 106, 107, 112, 113, 115,120, 127, 129, 130, 131, 132, 133, 134, 137, 139, 141, 143,145, 151, 152, 153, 159, 160, 161, 163, 166, 167, 169: n = A,T,C or G
  misc_feature 171, 172, 178, 181, 185, 187, 192, 205, 207, 209, 214, 219,220, 224, 230, 231, 233, 244, 246, 250, 256, 260, 264, 265,268, 271, 275, 276, 279, 282, 285, 292, 295, 299, 303, 306,318, 321, 324, 325, 327, 330, 332, 334, 335, 338, 359: n = A,T,C or G
  misc_feature 361, 370, 372, 373, 379: n = A,T,C or G
attggagctccccgcggtggcggccgaggtcaagcttttttttttttttttttttttttnnngnnnnntttntgcanncttnnnnanccnccncnncnaaannggnnggggnncnttttnaaaaatngnnnnnncangnangnanaaaggnnntttgcnnngnttnnananngcgatnaanatangnccccncatcattaagccntntnagaanggggnncatnaaaagnnangggggattttntntggngggccncccnaaannaanttnaagnnggnganttnaaaaaanttntganacanccnggagactggacnttnttnnanccngncnntgntgcttttaagggatttactancnaagaaaaanannccctgnttcgggacaaaaaaatgctctttttaacattca

SEQ ID NO: 32 - DNA, 220 bp, Homo sapiens
  misc_feature 1, 18, 25, 28, 39, 60, 65, 85, 104, 113, 119, 122, 128, 135,145, 148, 161, 165, 175: n = A,T,C or G
natggaatcctgttggcncatgatnaantaacccttacngttcagggttcctggaacttntaccngggccactctgacgggcctnaccacaggtgccccctacnacatcatangtggangcnctgaanagaccanctgaaggcantantggttcgggaacnaggngtgttaccgntgggcaactctggcttgaaccaacctacggatgactcgggctttg

SEQ ID NO: 33 - DNA, 703 bp, Homo sapiens
  misc_feature 5, 272, 286, 335, 360, 370, 411, 414, 436, 440, 446, 447,457, 468, 471, 475, 532, 539, 548, 554, 585, 594, 629, 633,636, 640, 667, 670, 676, 677, 682, 688, 691, 692: n = A,T,C or G
gaatnggagctccacgcgcggtggcgggccgaggtacacagtcagtgtggtttgccttgcacgatgatatggagagccagcccctgattggaacccagtccacagctattcctgcaccaactgacctgaagttcactcaggtcacacccacaagcctgagcgcccagtggacaccacccaatgttcagctcactggatatcgagtgcgggtgacccccaaggagaagaccggaccaatgaaagaaatcaaccttgctcctgacagctcatcncgtggttgtatcangacttatggtgggccaccaaatatgaagtgagtgtctatgctcttaaanggcactttgacaagcagaccagctnaaggtggtgncaacactctggagaaatgtaagccacccaagaaaggcttgngtnacagatgctcttgagaaccacnatcnccattnncttggagaancaaggactggnacnattnattggctttccaaggtggttcccgttccaggccatgggcccgacttccaattccggngaacccntttaggccngaatgntgggaagcttcaccattacagggtttaccanccaggcctntgacttacaagatttacctgtaccttgggccggtnttanaanttgngggatcccccgggcctgcagggaattnttntcaagnnttttngttacngtnnacctttaaggg

SEQ ID NO: 34 - DNA, 660 bp, Homo sapiens
  misc_feature 576, 641, 647: n = A,T,C or G
tcgactactataggggcgaattggagctccccgcggtggcggccgaggtacatttgtttatttaaagcacaggaaatgaataaaatgccacctaaaaagtatctgcaatgaataaattatttccagtgaagcactgcagatccacacacaccagtctgctaacctttaccaaggccatgtccggtgggcttgtgcttgtcccagttgactcttccttgagacctttcccttctgtgcaatgaccacagcattagagaccagtcctgcatgcgctggccttcctcgtaggcatggcagaccacgtggatgagcagtgggctggcatgcagtaggcttcaacaaatggcacttcactgtttccagtgaccctgaaatgttttatgtaagtggggcctgggctttaaagaaaagagccagggttcctcaggctgggccccttcactgaggcacagctccaggaaatactggtctcaggagccagcaacttgtccaggagttttgagccctcagttgaaggaaaatggccacgtgggtgtccttgcaggcaacagtgatgtcggtgatggtgacaagtanccagcctaaggaaggccaatcccaccttgggtgggaatgcaagggcacctagtcctgcttggaangggctnggaaggttgggga

SEQ ID NO: 35 - DNA, 311 bp, Homo sapiens
  misc_feature 24, 40, 41, 87, 100, 102, 119, 128, 139, 141, 154, 157, 180,184, 186, 236, 256, 260, 265, 271, 272, 275, 279, 299, 310: n = A,T,C or G
cggccgaggtacggagcaatcgangaggcataaccacacnnggggtggctatagggctggaaaacgctgaagatgactgctgacacngaggccaaggatngnaatacagccagcttggnaaagacatnaaagcaggagncnctacaagcgagcngcngcactaagaaacacccaacaccnccangngcctggacaggaggcccccagcagaaacatgcacgcataagcttcaagcncactccctaggatggatganagangggcncccaannaanggangcccaccaggacccaccagncagggccccang

SEQ ID NO: 36 - DNA, 396 bp, Homo sapiens
  misc_feature 33, 38, 42, 69, 73, 76, 79, 85, 94, 104, 126, 129, 133, 140,144, 146, 148, 149, 152, 156, 158, 188, 192, 197, 198, 206,208, 219, 251, 253, 258, 272, 274, 282, 284, 286, 296, 333,334, 335, 338, 354, 358, 370, 371: n = A,T,C or G
tccccgcggtggcggccgaggaccctgttttancgganacancaaacccacacgagcatgcgcgctccnacanganagngggccnaacactaanctgaaagcanaagtgcgcgggccgactgaccnacncaanaagaagntcananannacnacancnttggcatcatggtgggcggcaaaggctttnctanccgannccaaaccngntgtgaaaaacncttcatgacaaaagacgtgagccggggtcganancctgnaagcacaacaggcnanagagcgancncncatgtatganagaaccctcgaggacactcccaggggagatgcgccgnnnaanctgggagcagagcagnagcnggcaaacgcccnncagagcaaagggcttaagaaagaaa

SEQ ID NO: 37 - DNA, 164 bp, Homo sapiens
  misc_feature 11, 17, 26, 37, 106, 124, 134, 136, 147: n = A,T,C or G
ggcctctaaantgctgntggtcattnggctgagtcanaaagccacaaatgtctgctgctgtgatatatagcttgtcagctttacaaagcgggcctacgccattctnatcaagaagaatggttgncacagtattngngaactgcaccncaggtggagtgctaaca

SEQ ID NO: 38 - DNA, 78 bp, Homo sapiens
  misc_feature 64: n = A,T,C or G
cacaccatctttgtctagaatacccttgggggtgggatctagcacctgggatttgctgctgagnttatctttgggagg

SEQ ID NO: 39 - DNA, 578 bp, Homo sapiens
  misc_feature 26, 29, 38, 39, 43, 45, 49, 56, 58, 70, 74, 78, 80, 82, 84,87, 109, 133, 145, 147, 153, 156, 171, 172, 173, 174, 175,176, 190, 208, 211, 225, 229, 241, 253, 261, 264, 320, 333,337, 344, 360, 378, 379, 381, 383, 386, 398, 399, 400: n = A,T,C or G
  misc_feature 406, 414, 426, 428, 432, 433, 435, 452, 461, 464, 467, 468,474, 482, 494, 495, 507, 510, 523, 549, 552, 565, 571: n = A,T,C or G
cgcggtggcggccgaggtactatganccnaacaccaanngctncnctgnattgtgngntggaggttgagntggnaacnanancnaantcggatcacataaagaatgtanaaaaggtttgccgctcctgtgctngccaaacccggngntattantgngatgggaacctaaannnnnntggtcaacatcatntaccttttgaacaataangantcccacatcgtcancttntctatggtgaanctccgggtgtanattccctngcnctgtatgatttcatgcttgggatttacactcagaacttcgggagggaacatcctgntgtatgacctatncctntggggcnaatgtgtgtgtggacnctctctctctgactccanncntnttntggacaattctnnnaatganggggtaanacttaaccactncnggtnntnatctaaacatttctatntaaccaaantcnctnntggagntttgtgcnatgcctgttgcnngctatatgtaanagnctagaataataantgcaaaatggatatggctaactaaanatnctttcaaggttgngtttcnttttttt

SEQ ID NO: 40 - DNA, 619 bp, Homo sapiens
  misc_feature 13, 16, 17, 25, 27, 28, 30, 34, 35, 36, 38, 39, 42, 44, 45,46, 56, 61, 62, 63, 65, 66, 68, 70, 72, 75, 76, 77, 82,83, 84, 86, 88, 90, 98, 117, 119, 133, 145, 211, 213, 215,216, 230, 287, 291, 292, 294, 297, 298, 299, 307, 308, 315: n = A,T,C or G
  misc_feature 316, 317, 327, 331, 334, 336, 339, 347, 349, 352, 353, 355,367, 372, 384, 393, 401, 402, 411, 419, 421, 424, 432, 444,451, 453, 456, 458, 459, 464, 474, 475, 476, 486, 490, 499,500, 505, 514, 517, 518, 520, 532, 535, 551, 558, 562: n = A,T,C or G
  misc_feature 564, 593, 601, 602, 613: n = A,T,C or G
aggtacaagctgncanntaatattncnnanagtnnntnntgntnnnaaatcagcangaacnnncnngntncnatnnnaatannnancnanactgaagngaagtaaagcatcacccancncactagtccatctntatttcttaccnccttaactctaagaggaactttttcagcgggtatctcaccatcacggagttgaatccacattaccntncnnagaggtcctgaggnggaaatcataggaaaaggctgaacattgcctgttctgcttctaacaatcacaatacngttnngnggnnntaaaaganngcgaggnnnatatttagcnttgngcncnatntgaaatcnantanngngcaacaaccatnccccncgttttttaatngaaatgacnacctgctnngcgggcccnaaaagtgncncgnaacatttngcggttttccancgaaaananttngnnccccncttttccccnnnggaagcgccntaangaggggccnnggggnggttttttnaannanagggcccccccnctnccggggggggggtganaaaaaanaaanantaaacccccccccccccccgggggggggnttttaatnnaaaaaaaaacncccccc

SEQ ID NO: 41 - DNA, 63 bp, Homo sapiens
  misc_feature 23, 33: n = A,T,C or G
ctccaccgcggtggccggccgangtacactccntggccataccctggaattcttcccttaaca

SEQ ID NO: 42 - DNA, 46 bp, Homo sapiens
gctccccgcggtggcggccgaggtacaagctgtttttttttttttt

SEQ ID NO: 43 - DNA, 100 bp, Homo sapiens
  misc_feature 1, 51, 65, 74, 89, 91, 92: n = A,T,C or G
ncttagggcgaattggagctccccgcggtggcggccgaggtaccacatctnaaatgctctccagngttctgagnctattatgggaggancnncctttgag

SEQ ID NO: 44 - DNA, 80 bp, Homo sapiens
agctccaccgcggtggcggccgaggtacaagcttttttttttttttttttttttttttgttttttttttttttttttttt

SEQ ID NO: 45 - DNA, 21 bp, Homo sapiens
ggcggccgcccgggcaggtca

SEQ ID NO: 46 - DNA, 29 bp, Homo sapiens
ctccaccgcggtggcggccgaggtacaag

SEQ ID NO: 47 - DNA, 26 bp, Homo sapiens
ggcgaattggagctccccgcggtggc

SEQ ID NO: 48 - DNA, 75 bp, Homo sapiens
ccgggcaggtacaagctttttttttttttttttttttctttttttttcttttttttttttttttttttttttttt

SEQ ID NO: 49 - DNA, 498 bp, Homo sapiens
gattggagctccccgcggtggcggccgaggtacttaagtgactaccaggattggtcttaggcacttaggaaaatgtagagtctgttatatagctaataaatgtaggatctgttaaatatctgacacagctgatataacttgtgcttatacacatctgttagaatgaattggaacatcttgctgttcaggttgtaagctacacaaatcacccgttgcctagattcagtttccatgcgccttaaaacttgaatatttaggtatttgtttataaaaatacaacttattataactcagagtgtaaggatacatgagccaactgtgcaatggttgttaacaatctaggatggtgcaaggaaaaaaattaacagccaaatataagaaaagagatttggggctgttggattcagcaaggaatgagcatggcttgattcagtaaaagatcatttttctaaagattagtgcctcattcaatatgtctcttctcaatctcctgcctct

SEQ ID NO: 50 - DNA, 208 bp, Homo sapiens
  misc_feature 18, 46, 51, 58, 66, 68, 78, 79, 110, 132, 138, 157, 165,166, 189: n = A,T,C or G
gcgacacgggacaacacngagtttttacgcccgggggagacgctcnacacncacaccnaagacgcncngtgttgtatnnagggtgtgcagcgggccacagggcaccttgntgtagaacaggcccaacagacncgcctnggggagagttgtgcctacnggaagagnnggcatagaggcacattgtggggncgtttgcccgtctggcaca

SEQ ID NO: 51 - DNA, 679 bp, Homo sapiens
  misc_feature 1, 35, 41, 49, 52, 61, 84, 99, 119, 122, 127, 186, 232, 295,360, 421, 447, 454, 466, 478, 493, 508, 566, 591, 604, 616,624, 636, 652, 655, 660, 664, 679: n = A,T,C or G
nggggtggggccgggcccggaaagggtaccttggnagccangggattancgntggggccancgaaccccattcattccaggttngggggttaaaaaacntaaaccttggtcttcaacgnacnggtcntaaaaccccaagcttcaacggtttccccttaattaagttgggggtgggaaaacaaattnccaaccgcctttgggtggaaaattcttgctttcaccaaaatgggantaggggaaaagaagccccgaccattcggaaagggaatcaaaaaaaaagccggaacgttcggcnttattggaaaccgcctttggggccccggcccaccaaaggcccaagttttattcccttgttggggntaaaactttttttcttggaacaacccttttcttggcttttaaaaaaaccccccaaaaaaanggggtccaagaaaaaggggaatccgnttggaangggccccccgcnttttttcaaccngggtccttgggttanttttcggttaccccnttcgggggcccgggttttctttaaaaaaacctaaagttgggggaattccccccccccngggggcctttggccaaggggaaaanttttcccaaattntttccaaaaagnccttttanttccggaattanccccggttcggaaaanccnttctnaaanggggggggggggggn

SEQ ID NO: 52 - DNA, 902 bp, Homo sapiens
  misc_feature 11, 39, 75, 88, 116, 149, 152, 196, 225, 252, 294, 306, 329,350, 365, 386, 404, 414, 423, 434, 452, 465, 582, 586, 610,620, 634, 692, 700, 704, 714, 723, 728, 737, 754, 769, 788,796, 810, 822, 823, 825, 827, 838, 841, 846, 880: n = A,T,C or G
  misc_feature 884, 888: n = A,T,C or G
ggaacctcccncccgcggggggggcgggccgaagggttncccagccccccacccagccagccccctttggaccangcctttaaaattngggggattgaagtggttaaggggccttntccctttaagccattaaagggggaaaaggaacnggnttatttaaagccttggaagaaaagaaatttggaaaaggaaaagnaaattggggaggcccccccaaaaggaagnaaattaggccattaaaatttaaccaanggaaagggggaaaaaccattggaaaaggaaaaccaaaggccnccttttaaaagnaatattttaaacctttttcaagncccttttcttcccatttttcntttggaatggtcttnaaatggaagggccaaaaaaantaaaccttgggggccaanggggaccccnccccaaagnaattggaaaanaaaaagttttaaaatttnaaaaatgggtccnccaaattgggaaaaattttggaaggttggcccaatttaaattaccaaaccttggtttggaccttgggaccttttttccccaaaaaaacccccccgggttgggaatccgggtttaagnaagntatttcaattccaaatgggtttancccccgggangggggaattttttnggtttttcctgggcccttcaatttttatttaaaccttccaccttttcccattggttantttttttngggncccaggtttnttaggttanccccntttgggggncccggcttttttttaanaaaacctttagggtngggggaattcccccccccngggggccntttgccaagggggnaaaattttcccnnantnttttcaaaggnccnttttntttcgggattttaccccccggttccggaaacccnttcnaaangggggggggggggg

SEQ ID NO: 53 - DNA, 759 bp, Homo sapiens
  misc_feature 7, 15, 28, 31, 55, 84, 224, 325, 353, 368, 395, 415, 432,442, 465, 484, 490, 498, 532, 553, 554, 569, 575, 607, 640,663, 698, 702, 752: n = A,T,C or G
aaaaaantttttaanccaaagcctttanttntaggccagggggactttaaccccntttttcccttcttggcattaaatggaaanttaaacttaggaaaaattaacttttggcaaaggggaggaggcccaaaaagctttaaggaccccccggaaaaccagggaccgaagcttacccttaaaggaaaccaggcttaaaaaagggaagccaccaccccccgtcttanttgttaggccaaaaaaataagtggggggaaaggaattttattaaggggttagggaaggggcggaaccaaaaaccttaccccggaagccccttgggtggaantaaggccttgggtttggtccccaaaagnaattagggaaattcntttaagtttcaaaccttttttaaaaantttttggcccccacccaagnaaacccccttcttttantcccccccantaaccttaaggttttaattttantccggaaaaaccccattcnggggcnccttaacnttcaattttccaaaccccaaaattaaggcccccnttgggccccggttaccccttnngggccccggcttttnttaagnaaaccttaaagttgggggaattcccccccccngggggcctttggcaaaggggaaaattttcccgnaattatttcaaaaggccttttanttccggaattacccccggttccggaaccccttccnaaanggggggggggggggccccccggggttacccccccaagcctttttttggtnttccccc

SEQ ID NO: 54 - DNA, 829 bp, Homo sapiens
  misc_feature 6, 17, 23, 34, 39, 45, 49, 55, 77, 104, 132, 145, 152, 159,322, 534, 563, 590, 632, 654, 663, 674, 678, 684, 708, 735,738, 756, 768, 779, 786, 794, 808, 809: n = A,T,C or G
ggtttnaacccgttttnaaatgnggacttacttngtttngcctgnaatngggaancctccccccgccggtggggccnggcccgaaaggttactttttttcaagnttaaaatttaaaataaaaatgggccaantttgggaagggangggggancaagaanaaagggaacattgggggggaagttgaagaacccaaaacaaagggaatcaatggaatggaagaacccaagaaactttcccttaagaaaggaagttgggcccccgtttgtggaagcccttggaaaaaagaatcccccttgtaagccgacaccttggaagccaagnaagccttccctggtggcccctcttttccggtcccttgggccctcaaccgcctggtcctgggtttggggctttttcccccggaatccccggtccgttcccaatccttctggtttgggtccccttggtttgggtttggtttggttttggtggggttttttttggaagaaatggggggggggtttttccggcttcttttggttttggcccccaangggtttccttggccaaaaaaaaaccgttngccttggaagaaaattttccttaagtnggggaagggccaccccttaaaaagttccaagttggaaaggtnggggaattaaaccttggggttnacccctttnggggccccgcnttcnttaaanaaaaccttaaaggtgggggaattncccccccccggggggcctttggccaanggnaaatttttccgaaattanttccaaaagccntttaattccgnaaataanccccggtnccgaaaccccttcnnaaaggggggggggggggggc

SEQ ID NO: 55 - DNA, 597 bp, Homo sapiens
  misc_feature 20, 45, 77, 93, 124, 139, 343, 361, 418, 421, 446, 450, 455,468, 505, 524, 528, 546, 554, 565: n = A,T,C or G
catttttccaaaaacccatnttcacctttcaagtttttcccattngggttaaaccaatttggcggggggcctttccnttgggcttacccaatnaaagttcggccaattaagtttggaactggtngggaaattttcttcnaaatccttcttttaacattctttggaagccttggggtcctggttttttattaccacccaaaaaccaaaaactaaaaatcattccttgtttacttttaaaaccaaccaccaaaagtttccccattccaagaaaatggcccttattattttggaagaaaacccaccaaccggttggccctttcattaaggggggttccaagccggnaaggggttaaaaaagccnttctttccgggccaagccgcccgggctttggaaaactttcccttccccaaggggtcnttnggggtaacccttcgggggcccggcnttcnttaanaaaacctaaggtnggggaattcccccccccgggggccttgggcaaagggnaaaatttttccggaattanttcnaaaaggccttttaattcngaaattancccgggtccgnaaacccttccggaaaggggggggggggggggc

SEQ ID NO: 56 - DNA, 747 bp, Homo sapiens
  misc_feature 8, 20, 28, 53, 187, 366, 375, 381, 450, 504, 520, 569, 584,602, 621, 647, 667, 675, 689, 693, 729: n = A,T,C or G
ggtttttnggggtaaaaaanaagggccngggggggtaaaagaatttgcccgangtttccctttttaccttttttttttaaacccttttcccttaattgaagccaatgccctggtggttggggggttttggaccaagtggaaggggtaaataaattggaccttgggtttgggtttgaattgggtaagnaatattttgggggcctggtttaaaatttggtcaagtttccaagttggttttttaaaatccttggaccgccaagggcctttaatttgccgggaagggaagaaaatgggttttttccaattggtttaacctttaattaccttaaaccattttaaggtttcttttcttaattaaggggggtnggaataagnaatttnggggttccccaaattttggggggttggttggaaaggggaagtttccaagttttaattaattggtttttngggggggaatttttttttttaaggggttaaggttggggggttggttttggaagnccttttggaaaaccgncctttttccttttaaaataacccctttcggggccccggccttccttaanaaaaaccttaaggtnggggaattcccccccccngggggccttggccaagggnaaaattttccgaattattccaaaagnccttttaattcgggaattanccccggtnccgaaccccttccnaaangggggggggggggcccccccgggtaaccccccaaancctttttttgggtttccc

SEQ ID NO: 57 - DNA, 491 bp, Homo sapiens
aggaaaatgtaaagtctgttatatagctaataaatgtaggatctgttaaatatctgacacagctgatataacttgtgcttatacacatctgttagaatgaattggaacatcttgctgttcaggttgtaagctacacaaatcacccgttgcctagattcagtttccatgcgccttaaaacttgaatatttaggtatttgtttataaaaatacaacttattataactcagagtgtaaggatacatgagccaactgtgcaatggttgttaacaatctaggatggtgcaaggaaaaaaattaacagccaaatataagaaaagagatttggggctgttggattcagcaaggaatgagcatggcttgattcagtaaaagatcatttttctaaagattagtgcctcattcaatatgtctcttctcaatctcctgcctctttttttaaatgcctctttctacacatatatttgcacataatcttagaatatgattctgt

SEQ ID NO: 58 - DNA, 700 bp, Homo sapiens
  misc_feature 3, 21, 63, 97, 112, 136, 183, 221, 275, 310, 333, 408, 448,456, 478, 531, 543, 628, 633, 679: n = A,T,C or G
ccntttctttggggattcccnaaaaaaaaaaaaaaaaatccagcaagccacaaaatggcgaangggggtttctttggaatattaaagccgccccgcnattaccgtgggaatngggggttcaacaatcccttggttnaaatcaatggaacttcccacggccaaaggaacaacaagggaagttcnttccaaattgggaatggccccttcccaaggggtattcnttttttccaacttcctttggccaaggaattttttttttttaatggtccaaaatncttctttttcccggaacccaatttccttcccttcnaaaaaccttgggtaaccccttcnggggccccggctttccttaagaaaacccttaaggttggggaattccccccccccggggggccttggccaaggggnaaaatttttccggaattaatttccaaaaagcccttttaanttccgggnaatttaacccccggttcccggnaacccccttcccggaaagggggggggggggggggggccccccccgggggttancccccccaaagncctttttttttttggggtttttcccccccttttttttaaaggttggggaaggggggggggtttttaaaaaaatttttgggcccgncccgnccctttttgggggccgggtttaaaaaatttcaaatttggggggttnccaatttaaagggcctttggg

SEQ ID NO: 59 - DNA, 337 bp, Homo sapiens
  misc_feature 13, 196: n = A,T,C or G
gccgaaattggancctccacccgcggtgggcggcccgaaggtaccagccggcttcatgggaacatcaaagttccccggcttgggaagccaaggaagaattggcccaccttacccgcagcctggcttccgaggggacaagggaaagaatcaccttaccaaccaaatttgttctggcctcccaagggtccttcttganggcaagcaaggcttctgggggcctttctgcttgtcctttgggaggggtggttctttcttggggtaagaagggatggggaaagggaaaggggaccctttacccccccgggctcttctccttgaccctacccaattaaaaaaa

SEQ ID NO: 60 - DNA, 394 bp, Homo sapiens
aggtacagaatcatattctaagattatgtgcaaatatatgtgtagaaagaggcatttaaaaaaagaggcaggagattgagaagagacatattgaatgaggcactaatctttagaaaaatgatcttttactgaatcaagccatgctcattccttgctgaatccaacagccccaaatctcttttcttatatttggctgttaatttttttccttgcaccatcctagattgttaacaaccattgcacagttggctcatgtatccttacactctgagttataataagttgtatttttataaacaaatacctaaatattcaagttttaaggcgcatggaaactgaatctaggcaacgggtgatttgtgtagcttacaacctgaacagcaagatgttccaa

SEQ ID NO: 61 - DNA, 466 bp, Homo sapiens
agggcgaattggagctccccgcggtggcggccgaggtactccacgaggaaactacaattccaggaacagatttgaaactctcctacttgagttccagagctgcagggtataagtcagttctcaagatcaccatgacccagtctattattccatttaatttaatgaaggttcatcttatggtagctgtagtaggaagactcttccaaaagtggtttcctgcctcaccaaacttggcctatactttcatatgggataaaacagatgcatataatcagaaagtctatggtctatctgaagctgttgtgtcagttggatatgagtatgagtcgtgtttggacctgactctgtgggaaaagaggactgccattctgcagggctatgaattggatgccgtccaacatgggtggctggacattagataaacatcgcgtgctggatgtacctcggccgctctagaactagtgga

SEQ ID NO: 62 - DNA, 503 bp, Homo sapiens
  misc_feature 427, 431: n = A,T,C or G
ggctaattggagctccccgcggtggcggccgaggtatctccggggtggcgctggggttggctccatgaccaagatctatgggggacgtcagagaaacggcgtcatgcccagccacttcagccgaggctccaagagtgtggcccgccgggtcctccaagccctggaggggctgaaaatggtggaaaaggaccaagatggcggccgaggtcggtaattgataatctggcaccctgcaaggctagaatggcgatcaaacattttcactggctgagactctccttccatactccagtgataaactgcattatccgtaacaagaagcaacccgtattcaaagagatccatttccaaaaggtgacatcatcagtcatggtatgagccttcattttacttttcatttcaatggttaaaaatctgaagagttttnccanctttcaagtgcaatttactttgctaagcctggattcatgatggcgcctgtcttggcttgaaaattgggtctt

SEQ ID NO: 63 - DNA, 331 bp, Homo sapiens
  misc_feature 14, 16, 18, 21, 28, 30, 32, 33, 35, 37, 39, 40, 45, 46, 48,49, 51, 53, 56, 59, 61, 62, 66, 77, 80, 82, 85, 87, 92,94, 97, 102, 104, 106, 111, 113, 116, 118, 121, 126, 129,137, 143, 144, 149, 150, 157, 158, 160, 163, 165, 167, 168: n = A,T,C or G
  misc_feature 172, 177, 179, 185, 186, 187, 189, 193, 203, 215, 218, 223,228, 234, 240, 241, 243: n = A,T,C or G
aggtacactacctnanantgnttccacngncnngncncnntgctnnanngnanganggncnntatnctgtgtttatngcntngangntaaangnganagccngnantaaangnatncntgnctttnganctatgaanctcatnncaaanngatctanngnaanancnntganggggngncctgtnnncntgtncacctacctntatggaaaggtntgntggtntcttnaattanacatgnnantagatgcctgctggataatatataaacaataaaaacaactttcacttcttcctattgtaatcgtgtgccatggatctgatctgtacct

SEQ ID NO: 64 - DNA, 402 bp, Homo sapiens
cgaggtcgcagcagctggggaggagccaaagcctcggcgctcacctaagccgcagggagatacacccaactgggagatgaggaaacagcaacccagagaggagaactaacccacacaggatcatttcgtgaaggagcaaggctgaagaaccagacctggactttcttaggacaaacttactgcagcttgaaggagccaaccatggatttgaggcgtgtgaaggaatatttctcctggctctactatcaataccaaatcattagctgctgtgctgttttagagccctgggagcgatctatgtttaacaccatcttactaaccattattgctatggtgggtatacactgcctatgtctttattccaatccacattccctggcttgggaatttttctcaaaaata

SEQ ID NO: 65 - DNA, 431 bp, Homo sapiens
ccgggaggctcccaggcgcccggcgcagtgggaagctcgcagcagctggggaggagccaaagcctcggcgctcacctaagccgcagggagatacacccaactgggagatgaggaaacagcaacccagagaggagaactaacccacacaggatcatttcgtgaaggagcaaggctgaagaaccagacctggactttcttaggacaaacttactgcagcttgaaggagccaaccatggatttgaggcgtgtgaaggaatatttctcctggctctactatcaataccaaatcattagctgctgtgctgttttagagccctgggagcgatctatgtttaacaccatcttactaaccattattgctatggtggtatacactgcctatgtctttattccaatccacattcgcctggcttgggaatttttctcaaaaa

SEQ ID NO: 66 - DNA, 179 bp, Homo sapiens
  misc_feature 48, 52, 54, 62, 64, 65, 70, 85, 88, 96, 108, 109, 125, 129,131, 139, 142, 164, 167, 168, 170: n = A,T,C or G
tagggcgaattggagctccccgcggtggcggccgaggtactcgaacancatncngcagctgntnnacaanttccctcctgaccanctnacaagctnacgagcgccgtnntggtctgggcccaaangctntncacacccnctnacctttgatgtaaacaatcccntgnntntggactatg

SEQ ID NO: 67 - DNA, 147 bp, Homo sapiens
  misc_feature 19, 30, 42, 46, 63, 71, 73, 87, 93, 96, 100, 138, 143: n = A,T,C or G
ccgggcaggtaccacgtgnaccaccaccgntacctgggcggngacnggctggacgtggacgtncccacacntntggagggctggttnttctgnacncccncccgcaagctgatatggctggtgctgcagcccttcttntactnacta

SEQ ID NO: 68 - DNA, 128 bp, Homo sapiens
  misc_feature 8, 10, 19, 27, 38, 43, 49, 60, 61, 63, 65, 70, 79, 87, 88,104, 110, 116, 128: n = A,T,C or G
acgtaccnancttttgttnccttaagngagggttaatngcgcncttggngtaatcatggnnananctgtntactggaantcatgacnntgtctgggctgcaaanaagcantgcccntgtgatcatttn

SEQ ID NO: 69 - DNA, 671 bp, Homo sapiens
gcgaattggagctccacccgcggtggcggccgcccgtggagggtcaatcatggagatgagcccaacaaagcacagattatcgatagggaaattcacatcgtcagtgtcaaactggaacccttcaggaaactgttcatctggcagaaagaggtggcagaaacctaggactcgttctccgaggccccccagctccaaataggcgttctgaaaggcgtctttcagctcctcatccaggggctgctccttgccgtggaggaggatagagctgcaacggtctaggatcctttctggggcgcccttcatcaccaacaggtgttggggctccgatgtgttggggttcttatgaatagacaactggtacctcggccgcccgggcaggtacttttatcttaaaagggtggtagttttccctaaaatacttattatgtaagggtcattagacaaatgtcttgaagtagacatggaatttatgaatggttctttatcatttctcttccccctttttggcatcctggcttgcctccagttttaggtcctttagtttgcttctgtaagcaacgggaacacctgctgagggggctctttccctcatgtatacttcaagtaagatcaagaatcttttgtgaaattatagaaatttactatgtaaatgcttgatggaattttttcct

SEQ ID NO: 70 - DNA, 268 bp, Homo sapiens
ggaccttgtagggcacatacttcctgtagatatggcccaccctggagcaggggatgtcctccatgcggcccccacacatccacaccttgaaggagatttcatactgctcccctccccagatctccaagcctgggtcatacccgccgagttcccagaaccacttccgatccacggcgaacagtccaccggccatcacgggagactcaaatgggtcgctggggtcagctttctgcagttctggagggatcgggatccgcttgtagtacct

SEQ ID NO: 71 - DNA, 906 bp, Homo sapiens
  misc_feature 7, 123, 244, 409, 488, 493, 523, 551, 571, 601, 619, 633,642, 664, 701, 709, 722, 770, 781, 800, 804, 812, 818, 825,828, 842, 849, 865, 879, 884: n = A,T,C or G
tggggcngggcccgaaaggtaccttattgtggaacttttcatttggattgccccccagggaacaccaagaagaacttttttccaaaaaaacattggaattaccaggggggaacattcttcaanggcttggaactggtggctggtcctggaattggttggcttgccttgggtggtttggggtggaaaatttggaaaaagccttgggttattcttccaaagaaaattgggggccaagaacccccgnaagaaagccatgcccctttcttgggcctttaacacaactgggggtggtggaaaaaccaaacctaaatttggtccgggtggttttaaaccaaaaaaattggggaattttcccaccttggaaggcccgcccccttaccaagcccagggaaaagaaagaaatatttgnaaggggaaaaatttgggtttaaaaggggaaaagttccaaggccacctttttaccaatttttaaaagaaaaaaaaatttngggcntttacccaaaaccccccccggaacccaccnaagtttaagcccaatttttttggttggnccccaaaaattttttccttnggggttttgggggaaaattggggggttggnaacccaaaaccaattggnccttgggggaaaanccccaaaanggggccaatttgggttttaaanaaaacccctttggcccccccggggggggcccgggggnccccggcnttttcttttaaanaaaaacccttaaagggttggggggaaattccccccccccccggggggnccttttggccnaagggggaaaaaatttttncccnaaatttantttccnaaaaagnccnttttaatttccggnaatttanccccccggtttccggnaaaccccctttccnaaaangggggggggggggggggccccc

SEQ ID NO: 72 - DNA, 437 bp, Homo sapiens
  misc_feature 33, 48, 57, 61, 64, 327, 419: n = A,T,C or G
agggtggcaaaaaaaaaaagggccgttttgccntcaacaaattggtancccgagaantacnccntcaacattcacaagcgcttccatggagtgggcttcaagaaaccgtgcacctcgggcacctcaaagagattcggaaatttgccatgaaggagatgggaactccagatgtgcgcattgacaccaggcttcaacaaagcttgtctggggccaaaggaaataagggaatgtgccattaccgaatcccgtgtgccggctgtccagaaaacgtaatgagggatgaaagattcacccaaataagctatattacttttggttaccttatgntaccttcggcccgctctagaaacttaggtgggatcccccgggcctgcagggaaattccgatattcaaggcttatcgataccgtcgaccttcnaggggggggccccggtac

SEQ ID NO: 73 - DNA, 405 bp, Homo sapiens
  misc_feature 4, 5: n = A,T,C or G
ggcnnattggagctccccgcggtggcggccgaggtaccatttgtggtgcccaagtttaagttatcttacattcaacccaggacacaagaaactccttcacatctggaagaacttgaaggatctgccagagcatcttttggagatcgaaaggtagaactttccagttcatcccagcacgaacctagctatgatgtgtataacccattctatatgtatcagcacatttcacctgatttgagtcgacgctttcctccccgttcagaagtgacgagactgtatggatcggtttgtgatttaaggacgaacaaacttcccggttcccctgggctaagcaaatctatgtttgatcttacaaactcatctcagcgattcatccagagacatgattcattgtccagtgtacct

SEQ ID NO: 74 - DNA, 360 bp, Homo sapiens
  misc_feature 6: n = A,T,C or G
agggcnaattggagctccccgcggtggcggccgaggtaccaccagaggacacggataatcttcatatctgattctcctgcggtgcgtgtgccctgacagaagaagttgtatttgccttcccatactcctgttactaactcacagaacatatacagagacagcagtgtgagtccaaggttatacaccactaaaatcccccggcaagagaatggctgtttattcctcatgtattttggtcccagccatacaattagtaaatatatgacagagcagataaatgtgggtatataattgtccagaagaaaccatccttttactctagtatctcgagggcctagcaatgccttgaaataggtacct

SEQ ID NO: 75 - DNA, 391 bp, Homo sapiens
aggtgtcgccgccgcgaagggagccgccgccatgtctgcgcatctgcaatggatggtcgtgcggaactgctccagcttcctgatcaagaggaataagcagacctacagcactgagcccaataacttgaaggcccgcaattccttccgctacaacggactgattcaccgcaagactgtgggcgtggagccggcagccgacggcaaaggtgtcgtggtggtcattaagcggagatccggtgagttttgtctggtttgggccagagagcggcccctttcccgggtctgggaagctgtgattttttactgtcaggcagggaagagacggtaactgccatcgcggcgggccatccctgggcgccaggggtgtttggtctggggttacctgcccggg

SEQ ID NO: 76 - DNA, 430 bp, Homo sapiens
  misc_feature 16, 17, 22, 23, 28, 29, 35, 36, 37, 40, 41, 43, 46, 53, 57,68, 69, 70, 71, 80, 84, 87, 90, 91, 99, 100, 104, 109, 112,113, 116, 119, 121, 123, 125, 126, 130, 136, 141, 143, 144,197, 198, 216, 217, 219, 225, 226, 227, 231, 253, 255: n = A,T,C or G
  misc_feature 259, 265, 272, 277, 283, 297, 302, 305, 312, 318, 323, 325,334, 359, 363, 366, 383, 386, 393, 394, 401, 403, 409, 411,414, 418, 419, 421, 422: n = A,T,C or G
gcggccgaggtactgnnagggnnaaaannagctgnnnggnngncanaagtgcntctncttaaggaccnnnncctgctggnatanagnacnnaaacctannaccntggantgnngantancntnannggantacggncaaangnnggcctgcggctgctgaactaccattacttcactggtgtcagatggggagacgnnggcacgtaatgggcatanncntccttnnnggcnaatctgcaagcgtggaaggcancntgtnactgangccttcnacttncacttntaaccttggagctnactgnttnctgcctntggggnttttntnaagaaaccnacccactgtgatcaatattggaganaaantgnacattcttgggctgaanacnggcctcnnacactgntnacactngnctntganncnncagtacct

SEQ ID NO: 77 - DNA, 351 bp, Homo sapiens
  misc_feature 1, 37, 39, 42, 44, 45, 47, 50, 52, 54, 57, 60, 63, 67, 70,84, 88, 93, 94, 97, 99, 105, 106, 117, 123, 131, 134, 135,139, 141, 143, 146, 161, 175, 182: n = A,T,C or G
naattggagctccccgcggtggcggccgatgtacatntntcngnnanggncngntgnagnaanaccntancaatcctatccatnccgntgacnntgngngggggnncaaaacccaantgctgntgcctctnccnngccntnantgnaacactcagcgaaantcatggttcataantgaaacntgaattcctctagactctgcaatactgcactcttaacaaaaatcaaatgaaaacaagacgtgtctgccacaggtctcagggtaacagatgccctgtccactgagagcggcagttctgcagtcagagttctttgatcagccctggacccatttatcacatgggggaggaa

SEQ ID NO: 78 - DNA, 629 bp, Homo sapiens
  misc_feature 25, 63, 64, 65, 142, 158, 159, 160, 204, 223, 224, 233, 255,256, 257, 258, 260, 263, 270, 271, 272, 286, 287, 290, 291,292, 293, 295, 296, 297, 298, 299, 303, 324, 331, 333, 349,351, 352, 353, 354, 355, 356, 357, 358, 359, 360: n = A,T,C or G
  misc_feature 361, 362, 363, 364, 365, 366, 367, 369, 370, 371, 372, 373,374, 375, 376, 377, 380, 384, 386, 389, 390, 391, 393, 406,408, 409, 417, 419, 421, 424, 429, 434, 438, 439, 451, 453,456, 474, 475, 484, 486, 489, 492, 493, 501, 505, 516: n = A,T,C or G
  misc_feature 523, 536, 537, 538, 543, 546, 547, 554, 555, 558, 563, 565,568, 571, 572, 574, 575, 577, 581, 582, 586, 587, 592, 594,610, 611, 629: n = A,T,C or G
actccccgcggtggcggccgcccgngcaggtacaaagcttttttttttttttttttttttttnnnaattttttttttttttttttttttttttttttttttttttttttttttttttttttttttttttttttttttttttnaaaaaaaaaaaaaaannntttttttttttttttttaaaaaaaaaaaaaaaaaaaaccccccncaaaaaaaaaaaaaaaaannccccccccnaaaaaaaaaaaaaaaaaaaaannnncnacnccccccnnngggggggggggggnnccnnnncnnnnntttnaaaaaaaaaaaaaaaaaaaanacccccnanaaaaaaaaaaaaaaanannnnnnnnnnnnnnnnnannnnnnnnnaanaaananaannnanaaaaaaaaaaaanannaaaaaaanananaanaaaanaaaanaaannaaaaaaaaaaananaanaaaaaaaaaaaaaaaaannaaaaaaaananaanaannaaaaaaanaaanaaaaaaaaaanaaaaaanaaaaaaaaaaaannnaaaanaannaaaaaannaanaaaananaanaannannanaaannaaannaaaananaaaaaaaaaaaaaaannaaaaaaaaaaaaaaaaan

SEQ ID NO: 79 - DNA, 466 bp, Homo sapiens
ccgggcaggtactacccaagtgttacaggctctgcataggtcctcaaacactttaaaggacacgaaccatcaaattcaaaagagtagtgtttgttctatcagttctgaatgtccacagggagaggcaactagatttatgtggaaaaagtgctgtttgaaggagctgtgttttatttcgaagtgaaatgactttgggaaccagaacatttctgcagatgtctgaatatcaagaacctatctctaaaaggcatttatcaggaaatgttcgctcactccaagtgctttttaaaaattcaacatatggcaatgttttaatttttgtgctttcaagaggtaactaaatcgataggaagctgagggaagatcattccattatggactttcttgtttgggtgcaagacactatccacagcattgaaatctataatctcataaaagattcttataaacatataccatatttctc

SEQ ID NO: 80 - DNA, 468 bp, Homo sapiens
gattggagctccccgcggtggcggccgaggtacttgctggtctcaaatttccacaaggagatatcaatggtgataccacgttcacgctcagctttcagtttatccaagacccaggcatacttgaaggagccctttcccatctcagcagcctccttctcaaatttttcaatggttcttttgtcgatgccaccgcatttatagatcagatggccagtagtggtggacttgcccgaatctacgtgtccaatgacgacaatgttgatatgagtcttttcctttcccattttggcttttaggggtagttttcacgacacctgtgttctggcggcacctgcccgggcggccgaggtactacctgaaggagcttcagctgcccctgaagaaggaatgagtagcgacagtgacattgaatgtgacactgagaatgaggagcaggaagagcataccagtgtgggcgggtttcacgac

SEQ ID NO: 81 - DNA, 109 bp, Homo sapiens
  misc_feature 35, 40, 43, 58, 109: n = A,T,C or G
attggagctccccgcggtggcggccgaggtattanaccgncgngagacaggttaattntaccctactgatgatgtgttgttgccatggtaatcctgctcactacctctn

SEQ ID NO: 82 - DNA, 53 bp, Homo sapiens
  misc_feature 27, 44, 47, 48: n = A,T,C or G
tgctgtttcctgaactataccagtggnggaacacttgaacaaantgnntacct

SEQ ID NO: 83 - DNA, 404 bp, Homo sapiens
  misc_feature 3, 36, 43, 45, 49, 50, 55, 73, 75, 76, 79, 82, 94, 96, 100,102, 110, 111, 112, 113, 117, 119, 124, 128, 129, 131, 132,133, 135, 136, 143, 145, 151, 179, 214: n = A,T,C or G
gcnaattggagctccccgcggtggcggccgatgtanaactagngnatannccggnctgtatgaatattatatnannctnatncataccatttancncaangnggggcccnnnnccancnttttntttnntnnncnnaaggaanantgaacnctaaggaatacatcatggtaagattctntcctactgtgtcagcgagcgctgctgccggtctanattgccatgtcccaacaacagcaaagccaccctccctcctgcttcttccaggattgctctttaaagggaccagagtgacatactgatgcctactgaggcatctgagatgcactgtgttggaggttagcctcaatgccagcctctggttgtctaggtgagtgacatcaccataaaatcacattgtgtacct

SEQ ID NO: 84 - DNA, 122 bp, Homo sapiens
  misc_feature 96: n = A,T,C or G
ctatagggcgaattggagctccccgcggtggcggccgaggtacaagcacggttggcatggcctttccaaaggtcttccactagagtctagagaaanctaaatatagtcatccacaaactgga

SEQ ID NO: 85 - DNA, 403 bp, Homo sapiens
  misc_feature 284, 306, 311, 313, 316, 317, 327, 330, 333, 340, 353, 354,357, 361, 367, 369, 371, 372, 374, 376, 381, 390, 391: n = A,T,C or G
tggagctccccgcggtggcggccgaggtactccatttatataaaattctagagcaggcaaaactatagtcacagaaagttgaccactgattgtttggggctggcagttggggtatgattgaccacaaaagggcctgtaggaacttttagggtgacagaaatgttctatatattgaagttgtttttagttacatggatgtagcatttgtcaataatcggctaactggacatttaaaatggttccattttctcacatgtaaattatacctcaaagttgatccaaanaaaaaaaaaaaaaaaaaaaaangtttngnccnncccggggggnccnttnaaaaaanggggacccccccnnccngggnaatttnantnnancnttttnaaaccccgnncccccggggggg

SEQ ID NO: 86 - DNA, 423 bp, Homo sapiens
  misc_feature 139, 143, 147, 157, 158, 161, 165, 173, 187, 204, 208, 228,249, 257, 260, 272, 276, 301, 320, 324, 325, 337, 346, 350,359, 367, 372, 374, 375, 378, 380, 383: n = A,T,C or G
aggtaccagttatccactcactgacttaggtgcctccactagaattctcagcacgtttttgcagaacctgggcaacaagagcgaaaccccatctcaaaaccacaacaacaacaacaggacaacagagattggacgaccngatngggnaaaagccaanncanacangcgtgaanggccaggtaccggnaaagtaggcacaagggnagcntctgctcagtgtcgctacangggggatctctcaaggacttnacaaacgnggnccacatccttcntagngggaaagattacttggttctcattnaatggatccctttgttttngggnncctacaccttcnccccaatgnttcncttttcttncttggtantcccntnnctntnccnaaacttgggcccaatttttaatttttaattttttaaacct

SEQ ID NO: 87 - DNA, 570 bp, Homo sapiens
  misc_feature 397, 418, 434, 440, 450, 492, 537: n = A,T,C or G
cgaggtacagtccagtccttggagatcgacctggactccatgagaaatcttgaaggccagcttggagaacagcctgagggaggtggaggcccgctcgccctacagatggagcagctcaacgggatcctgctgcaccttgaagttcaaaagctggcacagacccgggcagagggacaagccgccaggcccaggagtatgaggccctgctgaacatcaaggtcaagctggaggctgagatcgccaccttccgcccgccctgctggaaagatggcgaggactttaatcttggtgatgcccttggacaagcaagcaactccattgccaaaccattccaaaaagaccacccaccccgcccggataggtgggatgggcaaaagtggtgtcttgaagaaccaantgaccacccaaagttcttgangcattaaacccagcanaagcangggtaccttnggccgcttctaaaaactagtgggatccccccgggcttgccanggaatttcgatatcaaagccttatcgaatacccgtccgaccctcnaagggggggggccccggtaccccaacttttttg

SEQ ID NO: 88 - DNA, 313 bp, Homo sapiens
  misc_feature 4, 11, 20, 23, 25, 31, 33, 38, 40, 44, 46, 51, 58, 59, 62,68, 74, 78, 80, 81, 85, 89, 92, 96, 97, 99, 102, 104, 109,111, 112, 115, 120, 129, 135, 139, 151, 158, 175, 182, 185,188, 190, 198, 202, 203, 208, 217, 226, 227, 269, 272: n = A,T,C or G
  misc_feature 276, 280, 289, 293, 296, 298: n = A,T,C or G
acgnactaatnctgactgtnaangngacgcntnacgancnttcncnccttntgggtcnnaancaggangagttngatnanncatnacanagntaanngnttngnggcgnannagnatccntaacaaagntacttntagnacgtctgatggnacctctncctatctttaacaagcngattccnccnacngntggattgntaanncactnttatcgganacctgagcnnttttaggacgggcccgagacaagcttttgttaccttactgangangtgntggngccctgggnatantgntnagtacctgcccgggc

SEQ ID NO: 89 - DNA, 342 bp, Homo sapiens
  misc_feature 1, 3, 4, 8, 9, 23, 27, 32, 33, 35, 38, 40, 46, 49, 55, 65,74, 78, 80, 89, 98, 101, 106, 113, 114, 124, 133, 135, 137,143, 170, 180, 187, 195, 213, 223, 256, 266, 277, 291, 312,329, 339: n = A,T,C or G
ncnnggcnngtacacgggaaacnattnattcnngnctnangggganttnccttancggatactanacccatacntttnanggctatgancacagacangtnagatnccatgcnncctgggccangatcttccncnantagttncctgcttaagcaaatagaatttcttanggggcagatnccaaaancaccgatnattggaaagcaaacaccnacactgccancttccctcccaggactcctgccaaggtttccantacctaacgncgctctaaaantagtgaatcccccnggctgcaatgaattcgatatnaagcttatcaatacccntcatacctangat

SEQ ID NO: 90 - DNA, 335 bp, Homo sapiens
  misc_feature 12, 13, 14, 23, 25, 29, 31, 37, 38, 41, 50, 52, 55, 59, 60,61, 65, 69, 70, 73, 80, 83, 84, 88, 89, 94, 102, 111, 114,117, 126, 133, 138, 140, 149, 162, 188, 235, 239, 243, 251,252, 253, 255, 257, 258, 260, 267, 268, 271, 280, 281: n = A,T,C or G
  misc_feature 283, 286, 298, 302, 304, 305, 315, 333: n = A,T,C or G
aggtacatggannnattggcttntnaccngntgctcnnccngaccattgntngcnggcnnntggncatnnacnaagccanaannaaanntctgncacaaaancgaaatctnccnatntacattacnaatacgntaaancncaccaaggngtgaaggcgatantgcaggaactgcaatggacccctggntggaaccctatcatagggacaaggatggcttcctgggaactccgagngganggangactgctnnntnanncnagcacanncangatgaaganntnttnattctttaagancctngnnattgaacttnacactgatctgtacctcncc

SEQ ID NO: 91 - DNA, 155 bp, Homo sapiens
  misc_feature 29, 31, 32, 37, 48, 65, 77, 78, 79, 80, 85, 90, 95, 98, 99,105, 106, 122, 144: n = A,T,C or G
gattggagctccccgcggtggcggcccgncnngccangtacataagcnaatatgcccattggggncctgggcactannnngtctnttttnggcanaannaatgannctgtgaacgtggcccntgatgcctaatatcccacaacnactgtgcctat

SEQ ID NO: 92 - DNA, 478 bp, Homo sapiens
  misc_feature 5, 18, 21, 22, 30, 31, 38, 40, 56, 61, 63, 66, 76, 81, 87,88, 90, 91, 95, 96, 100, 101, 102, 106, 107, 108, 110, 111,114, 115, 116, 117, 120, 121, 122, 124, 125, 126, 128, 131,133, 135, 136, 139, 143, 146, 148, 154, 156, 158, 163: n = A,T,C or G
  misc_feature 165, 167, 168, 169, 173, 175, 177, 178, 182, 183, 184, 185,188, 198, 203, 205, 206, 213, 217, 218, 220, 226, 229, 235,240, 243, 244, 247, 248, 250, 252, 254, 270, 271, 283, 286,287, 288, 289, 316, 326, 331, 335, 344, 348, 350, 353: n = A,T,C or G
  misc_feature 355, 356, 364, 365, 368, 371, 372, 373, 380, 383, 386, 394,402, 405, 408, 409, 422, 430, 443, 451, 469: n = A,T,C or G
acgtnccaggggctgtgnatnnactacctnncatagancnccgccctcattcagcncaaantntangacttcttgntcaanctgagnncnncatnnatannnaccnnncnnttnnnngannnannnantcncnanntantganaanantctttntntncaccntnannnttangntnntcannnnctntcaagacaantacgngnncaatatnaggnntnctaatnttnggggcncgatnttnntanntncnantctggctatataactnnccacatgactgntannnnacttcaatcgttcaagaattatatgancctatgaccncaatnaatnccatgtacntctnangcntnncaactacnngancgnnnggcctgnaanaantctatatnaaccttanctnaannttaaacctccacngggggccntcatcccaatttntgttcctntaatgaaggttaattgcncccttggcg

SEQ ID NO: 93 - DNA, 414 bp, Homo sapiens
  misc_feature 6, 74, 81, 87, 92, 100, 101, 102, 105, 106, 111, 112, 113,114, 115, 116, 117, 122, 123, 124, 128, 132, 134, 135, 144,145, 146, 147, 152, 154, 158, 159, 168, 170, 176, 177, 181,182, 185, 196, 202, 204, 205, 208, 210, 217, 222, 223: n = A,T,C or G
  misc_feature 224, 230, 231, 232, 233, 240, 243, 244, 245, 247, 248, 251,252, 253, 254, 256, 257, 258, 261, 262, 263, 268, 270, 272,279, 280, 286, 287, 288, 293, 300, 305, 306, 308, 309, 328,339, 347, 348, 359, 365, 372, 378, 388, 389, 402, 406: n = A,T,C or G
agggcnaattggagctccccgcggtggcggccgaggtacaagcttttttttttttttttttttttttttttttnaaaaaancccccnttttnaatttttnnnccnnttttnnnnnnnaaaannnaaancccntnnttttttttnnnnccccngncccnntttaaaaancntttttnngggnnccnggggggggggncccccncnnttngnaaaaaanccccnnngggggnnnnccccccnttnnnannccnnnnannnccnnnaaaangntnaaaaaanncccccnnnttttnggggggnccccnngnnttttaaaaaaaaaaccccnggggccccccnaaaggggnntttaaaaaaancccccnttttttncccccngggggggggnnccccccaaaaaancccntttttttt

SEQ ID NO: 94 - DNA, 405 bp, Homo sapiens
  misc_feature 10, 14, 15, 16, 17, 20, 23, 29, 33, 40, 41, 42, 45, 49, 53,55, 59, 64, 70, 71, 78, 81, 82, 86, 87, 94, 95, 111, 114,119, 128, 134, 140, 143, 144, 146, 153, 156, 157, 162, 164,169, 172, 182, 187, 188, 190, 193, 200, 202, 206, 210: n = A,T,C or G
  misc_feature 211, 212, 215, 220, 222, 223, 224, 226, 230, 236, 238, 242,245, 246, 248, 253, 256, 262, 263, 264, 266, 267, 269, 279,282, 288, 291, 294, 295, 297, 302, 304, 307, 308, 310, 312,313, 314, 316, 320, 321, 324, 325, 328, 329, 330, 332: n = A,T,C or G
  misc_feature 335, 339, 341, 344, 347, 354, 355, 356, 361, 364, 365, 366,369, 371, 384, 389, 391: n = A,T,C or G
acaaagatgntccnnnngtnccnaatacncttnaaagaannnganggantttncntganctatntatcanncgcctgncanntaannaggcccnnaagatgctattaccangcntagancgaaccatntgtatnagaaanccnngncctatcncanngaatntnggccnatnttcctgggcngttcnngnacnagaggancncccnggannnggnaatcntnnntncagnttatcnanaccngcnncntcgcnggngggccnnnanncnagccttcgtnccntttaanganggnncntagcncnctnntncnnntnatgnncanngcnnntnccngtcnanaanttntggatcnnncgggntgnnngantncgctcttggcctnatcantnccatagacctttct

SEQ ID NO: 95 - DNA, 523 bp, Homo sapiens
  misc_feature 128, 155, 217, 218, 230, 234, 237, 257, 260, 282, 286, 289,290, 298, 313, 321, 336, 358, 365, 388, 396, 411, 426, 434,443, 451, 466, 467, 473, 481, 482, 486, 493, 508, 510, 521: n = A,T,C or G
aggtctaatctacaagcgtggttatggcaaaatcaataagaagcgaattgctttgacagataacgctttgattgctcgatctcttggtaaatacggcatcatctgcatggaggatttgattcatgagnatctatactgtttggaaaacgcctttnaaaaggagggccaaaataacctttcctgttggggcccccttttcaaaaaatttggttctttnnttccaccgtagnggtnggnaattggaaaagaaaaaaaanagnaaccccaaccccccattttttnttgnttnngaaaaatngttggggaagaaaantggccttngggccaaaaccatgnggggtaggggggaaccccaagnaattccnaaaacccaagggggccttttaanttttaagnaaaaaggaaaattgngaaaacctttaaaanggggttgnttcctttancccaattngaaattttatttttnnttttcnttaaaagnncctngggggtnttggggttttaaaantnaaaaaacccangg

SEQ ID NO: 96 - DNA, 350 bp, Homo sapiens
  misc_feature 297, 322: n = A,T,C or G
gctcatcaacacctctgactttgagttttttcgtgaaggtgggaatgtttagctcgggagagttgatttataagaaaaagacacgcttactgaaggcctccaatggaagagtcaagtggggagagactatgatttttccacttatacagagtgaaaaagaaattgtttttctcattaagctttacagtcgaagctctgtaagaagaaaacactttgtgggccaggttagtaggagtttttatccttccttatattttttctatgcatttaaacagtcagttaacaaagggaatacangataatattaaagtcaaatagaagnacctcggccgcctctagaactagtggat

SEQ ID NO: 97 - DNA, 282 bp, Homo sapiens
  misc_feature 7, 23, 25, 26, 27, 28, 30, 31, 32, 33, 36, 38, 39, 40, 42,45, 46, 47, 61, 62, 63, 74, 75, 79, 80, 81, 82, 88, 92,93, 94, 102, 107, 108, 110, 113, 116, 124, 130, 134, 156,166, 169, 173, 179, 183, 189, 194, 199, 201, 210, 226, 234: n = A,T,C or G
  misc_feature 240, 249, 259: n = A,T,C or G
aggtacntatcgatacccacatncnnnntnnnnacnannnantannntagagtatctatgnnnttccctgactnnatgnnnngtgaangtgnnnacatcctnccgcnntnatnaanggatactntgactncctnctcctcactgaggtgcctcatnctacccgggngtncctntgccancctncctggnacatntgctngnacctgcccnatgccaggatcatggnaccaggcnagaggncacccgttncttcctcccncatgtagataaatgggtccaggg

SEQ ID NO: 98 - DNA, 224 bp, Homo sapiens
  misc_feature 44, 48, 60, 65, 75, 80, 82, 85, 89, 90, 96, 112, 117, 125,133, 134, 143, 148, 149, 155, 158, 159, 163, 165, 166, 167,169, 182, 184, 186, 194, 196, 203, 206, 208, 212: n = A,T,C or G
cttagggcgaattggagctccccgcggtggcggccgaggtcccntacngacactggcccnagtanacggtgagtnatggngncanttgnntgggangagttcataaatatgnttggnagctaaancgcatggnntgatgctcntgaannctaatnctnntggntnnntncagtcatgcctananancctggtgnantggtganatnantacncaggggtttggt

SEQ ID NO: 99 - DNA, 223 bp, Homo sapiens
  misc_feature 1, 43, 44, 49, 52, 56, 58, 62, 65, 74, 85, 92, 93, 110, 115,120, 121, 131, 134, 154, 156, 183, 188, 200, 207, 209: n = A,T,C or G
naattggcagctccaccgcggtggcggccgaggtacagatcanngtggnttncctncnttgnaanaataatttngctaaaccacnaagtgtnncgtgcattgctactacnttggntctgnntccacaaaanagntttgaactctgctaactcanantcttaaaagaaatctcctggtctaatngtatnatgaaaaataanaactatnanccgacaattgagtt

SEQ ID NO: 100 - DNA, 216 bp, Homo sapiens
  misc_feature 11, 16, 18, 19, 21, 22, 23, 27, 28, 31, 33, 38, 40, 44, 45,48, 50, 52, 54, 55, 58, 78, 87, 88, 91, 99, 100, 102, 107,114, 115, 123, 124, 125, 127, 128, 143, 153, 199: n = A,T,C or G
aggtacagagntgccnannannngggnnctntncttgnancacnngantngntnnctntaacatggggctacttacgncttcttacnngancacttggnnanatttncctttgnnctaatacnnngnnacgtcatagatggtntgggacatantcttcctcccttagaatcgtgggggagcgtgatgatgatccactangtgttagcaatatgcct

SEQ ID NO: 101 - DNA, 411 bp, Homo sapiens
  misc_feature 42, 43, 47, 49, 55, 65, 67, 70, 72, 74, 78, 79, 81, 88, 90,91, 92, 96, 97, 98, 99, 100, 101, 103, 107, 111, 113, 114,122, 123, 126, 127, 128, 131, 136, 140, 141, 150, 151, 152,153, 155, 161, 162, 163, 164, 171, 183, 185, 190, 192: n = A,T,C or G
  misc_feature 194, 195, 196, 199, 200, 203, 208, 217, 218, 221, 224, 226,227, 232, 236, 238, 240, 241, 244, 245, 252, 255, 256, 257,259, 266, 269, 273, 274, 279, 282, 287, 291, 293, 294, 301,303, 305, 308, 311, 312, 313, 316, 319, 322, 323, 324: n = A,T,C or G
  misc_feature 326, 327, 331, 332, 333, 334, 341, 342, 344, 346, 354, 358,361, 363, 370, 374, 378, 382, 383, 384, 386, 391, 392, 399,403: n = A,T,C or G
atagggcgaattggagctccccgcggtggcggccgaggtacnnttananctccangagaagtgantnatnananatanntnctattanannnctgnnnnnnancatnctcngnnggtcccannctnnntgncgatnagannactgagggnnnntnagaaannnnctatgcnttatgcaattgntntgtcntnannnctnntcntatcnactatagcnnttnctngnnacatnacantncnngcnncaatctngannnantggatcntcnggcnngcagnaantgcanatgntnnttatacntncngcngannnaanagnggnnncnngctnnnncctatgnnancnttatatgncggnatntngcacacnggtnctantaannntnatatnnatttgcngaanatgtacct

SEQ ID NO: 102 - DNA, 25 bp, Homo sapiens
aattggagctccccgcggtggcggc

SEQ ID NO: 103 - DNA, 30 bp, Homo sapiens
  misc_feature 2: n = A,T,C or G
cnaattggagctccccgcggtggcggcccg

SEQ ID NO: 104 - DNA, 24 bp, Homo sapiens
  misc_feature 3: n = A,T,C or G
gcnaattggagctccaccgcggtg

SEQ ID NO: 105 - DNA, 42 bp, Homo sapiens
  misc_feature 9, 26, 27, 28, 41: n = A,T,C or G
ctccaccgnggtggcggccgaggtcnnncaacatggtgttna

SEQ ID NO: 106 - DNA, 20 bp, Homo sapiens
gagctccccgcggtggcggc

SEQ ID NO: 107 - DNA, 32 bp, Homo sapiens
ctgattggagctccccgcggtggcggccgagg

SEQ ID NO: 108 - DNA, 61 bp, Homo sapiens
  misc_feature 1: n = A,T,C or G
ngattggagctccccgcggtggcggccgaggtacccaaaacaagtgcttaaaaaaaaaaaa

SEQ ID NO: 109 - DNA, 121 bp, Homo sapiens
  misc_feature 32, 66, 67, 74, 86, 110: n = A,T,C or G
ttggagctccccgcggtggcggccgaggtacnagacccagaggcggctgctctctccccccagctnngtaaggngcctccaaaaanaaattttttttttttttttttctnctggggatgca

SEQ ID NO: 110 - DNA, 21 bp, Homo sapiens
ctaattggagctccaccgcgg

SEQ ID NO: 111 - DNA, 81 bp, Homo sapiens
  misc_feature 66, 71, 75: n = A,T,C or G
gctccccgcggtggcggccgaggtaccaccattgtaaggaaacactttcagaaattcagctggttnctccnaaanaaaaaa

SEQ ID NO: 112 - DNA, 53 bp, Homo sapiens
  misc_feature 11, 40: n = A,T,C or G
aggtacctttngaccccatggaaaaaaaatatctaacgtncagaactaccaat

SEQ ID NO: 113 - DNA, 633 bp, Homo sapiens
  misc_feature 381, 546, 565, 592: n = A,T,C or G
attggagctccccgcggtggcggccgaggtacggtggggcacccaggtagtaatatgcaggaagtagaattggcaacaaaggacacagaatgaaatggtgagatggctagcggaaacatagggagaatggcatcacaaaggcaaaggggggaaagaatttcagtttagtggatagtcaaccaaggcatttcacttagcagtcaggaatgaaaaaacgatactgaatttgaacattaggaaagcttggtaaatttcaagagtataatttctgcaaagttggaacacagtgaataaaaaagtgctaagaaattgaggacaattgaaaagtttagcaaatgataagacaaagcagaagaagatagtagatagtgaggacagcanaatcaataggagggtttcttgggaaggccatctttgttttaaagtttatggggagagaaccagtgtgcgaatggaagtagctagggggagaaactgaaaatgctaggaagactgggtgtggtggctcatgcttgtaagtctcagctgctcagaagcctgacgtangagaattgcttgaccccantagtttcgtgaccagcctggaatatanccagaccctgtttccataaaaaaaaaaagctaggaaggtaa

SEQ ID NO: 114 - DNA, 543 bp, Homo sapiens
  misc_feature 433, 440, 498: n = A,T,C or G
tacttttaaaccaggtgagaaaaattaaattatgtattctaacaaagtaatatgtgagattttgcaaatgattttatagaaatacacaaaataactctttagcttgctctgagcatttttttcttttctgatagcaactttttaacgttgtggatccacagaacttactgctttgctttctcttttggggtcataattcctctccccttggagtgtccactccatgcatgtgcacttaggatgtgtggctgtgtgtgtgtttgggaaccctcacggacacataaggttctattgtcatcaagtagaaaacctatctcattatcattataatgtcttcagatgctttctaaggttcacctcttttttaacattagaagtcagtgaatgcagctttcattataatttttaatactttaaaatgtttttgtattanctgccanaatgctcagcagcaaaagttatgactcacttctagcaagtgtggtagttctttgcttnaagcatttgggtttcatgtagcttttcttcttattttttctttgg

SEQ ID NO: 115 - DNA, 329 bp, Homo sapiens
gggcaggtacttttttttattttttatttttttttatttttagtagagatggggtttcgccatgttggccaggatggtctcgatctcctgaccttgtgatccacatgcctcggcctcccaaagtgctgagattacaggtgtgagccaccgcgcccggaaggggaaggatctctttattcaaatacgcacatgcacgtgcacagataccttgcatctgtgaaaggaagctaagaaatctgcagtcggcagctatttggaactatggcttataaacttatgtttttcaggagacagagaaaccaagacttgggccagtctttgcagtgacc

SEQ ID NO: 116 - DNA, 329 bp, Homo sapiens
ccgggcaggtacttaaacaccaggcggacatttctccaggaagcattccatagctgtctcctcccccaccttccaaaggtcacagagaaccctgggcccacctctgtggctgcagtcactgtgctgattgtcatgtctgtttacttgtatatttcttggctaccctgttagctgcacaggggagagacagatctgatttgatttggtattgctagtgtgagacatagaccttggtgctcaatatatgtttgtgaaaaatcacagaagaggccataaactgggggcagaaaatcaaaagcattaggtcaaaagatatcagaggattcaca

SEQ ID NO: 117 - DNA, 208 bp, Homo sapiens
aggtaccaaaattctaacttagggctttagagttcctggattccaagggaatgcactcttacatatactacatcatgtgctgctcaccatccatgtggtgatgaggagcattagataaggagcattaggtccatgtagcagaacagtaaactgaagctccgaacagcgaaggagctcacccaagagagcacagggctaggatcaggaa

SEQ ID NO: 118 - DNA, 610 bp, Homo sapiens
  misc_feature 319, 463, 518, 546, 553, 554, 579, 599: n = A,T,C or G
ccgggcaggtacaatttattgcagacccagacacgagaaggtcagagaaaatcagagaaagcaagcaagtgaatttgccttactctaggacccacactttggtgatcacagctggatgaagaatgtcaggggatgaatcggaagaaatgaaactggaaagaggaaggaaccaagtcttgaagggccttggaagccatgttaagaaggatgaatgagaggtaaagaagacgacattgagctttctcacttgggcagttggcggatggcagttggtggatggcagtgggtggatgactttactgaggtaggaagcctgagnaggaaaagcaggttttgagggagagtttgactaattgcagtttaagacatgtcatgtcggaaacatcatgtatcacactgtcccagtaagtagtttgaagacaaagatctggatctcaagagaaggagtatggggctgaagatngcaattatgggaactattgctacattggttgggttattaaagacaaaagaagttngcttgaaatttgccaaggggagagtttnaccaganngagaaaaccaggccccaggattagnagcttcccaaaggaactttnaaaaagttaaa

SEQ ID NO: 119 - DNA, 133 bp, Homo sapiens
  misc_feature 75: n = A,T,C or G
ggggccattgagactgccatggaagacttgaaaggtcacgtagctgagacttctggagagaccattcaaggcttntggctcttgacaaagatagaccactggaacaatgagaaggagagaattctactggtca

SEQ ID NO: 120 - DNA, 421 bp, Homo sapiens
  misc_feature 77, 320, 321, 371, 378, 397: n = A,T,C or G
aggtactgtgctcagccaggagaggcccagcattgctcagtggctatgctcctgacggattctgatgatcgatgtanaccttcggagatcactgatacctagccacttaatctcgttcctcacagccagagaatatacgtaagtaaattgcagaagtgttggactcaggagaggccagttagttttggggcacctctcttacagagctctttgggtggaaagaagaagtggtgaaatgacctatgcttctgtttcatcatgacagggaaatctggaaggggaattcagtctagtgaatttacttaaaatattagctgcannaaactaatttacaggggaaagcggctttgtgacatttttaagtgtagaangatccanatgagaaatgtgaatttcntaccagaaactttggggtagtcct

SEQ ID NO: 121 - DNA, 698 bp, Homo sapiens
  misc_feature 249, 421, 456, 578, 595, 601, 604, 650, 651, 654, 663, 666,679, 686, 687: n = A,T,C or G
aggtactttttggttactacctttacagacggcatcaacatggaccctcacacctgcacctgagcaatgtgggacatttgattcctcatggtgacagtttctttcccaccccaagctccagggagacagtaagctttctcatcatttctctgggcttgtgggcaaacattttttagtctatgggaacagggagcacttccagactctattcttcatgcaggaatcttaattaaaacctctccacctcanatatgcctgcagccacgtccgttgtccccaaacagatattaaaatccagcattaggaccacttagccctattcctatttgaaagcctctttgggcagccatgatatcattattattctccttattctgggattgcttttttacttcatttcttcttctttttaaagtattangctctattgagatataattcagatatcacaccaantcacctatttaaaagtataccaattcaatgggtttcttagtatattcacagagctgggcaaccatcaccacaagccaatttttaagaacattttttcttaccctaaaaaaaagaaacccccngtaccctgcccggggcnggccgnttntaaaaactaagtggaatccccccggggcttgcaagggaattccgannttnaaggccttnttngaatacccggccnaccctcnnagggggggggg

SEQ ID NO: 122 - DNA, 472 bp, Homo sapiens
  misc_feature 254, 306, 381, 416, 441, 448: n = A,T,C or G
ccgggcaggtactttaatacctgtgatcaaggtgtctttaaataattgctttcatctgtgaatggcgaaattactagcataataagattgctgtaatattggtcagcttctggagtagatagataaagaattgtgtaatcagtttgtgtccccagctgaggggatattccttctcttctcgttttatattaattgaattattttttaactccaaaaagaaatacatacttattgttactaattaaatagtgcanggttattcaaaagaaatcttaatttttctttcactacctccctaaggaaggntaacgttcactattcagtatcttttcatacttttttctttggttctacagtaaacataaaatagctatatatagnggccccttttaaataaaaatgtggattgtgcaatnacaacaattatttttattccttttnaaacacnttgtttcaaggggttcttggggcc

SEQ ID NO: 123 - DNA, 189 bp, Homo sapiens
  misc_feature 115, 183: n = A,T,C or G
ccgggcaggtacctgaggtgaccccaaaattcatccaaatattctatccaagagcaggcaaatgctacatgggaaatcacaaagaggaggaaaaaaagagagagaagagacaaantgaagctttgacaagcagctcagctgggccagccccttggaagggagccagcattgggaaagcagcancagctc

SEQ ID NO: 124 - DNA, 399 bp, Homo sapiens
cgaattggagctccccgcggtggcggccgcccgggcaggtaccatggcacatatgtgaggttttcttcaaaacagattgtgttgcaggaactgaaacaccaccaaaaacaatcccattaaatgtgggcaaaggggccgggcctggtggctcacacctgtaagcccagcacgcctggcccccatattcttaactaccaagctgtatgctctctgggatccttcacaaaacatgaatgtcactgctctgctgtatgcctccagtctccccatctctcctctcctccatcatcataccttttccagcctgtcccttgtgcagttcttggctcaccatctgagtatctatgagactgcttaaagtctctctgcctggaattaaaacttgcaaatgaaagcctt

SEQ ID NO: 125 - DNA, 355 bp, Homo sapiens
  misc_feature 71, 88, 92, 108, 253, 332: n = A,T,C or G
ggcggccgaggtacctttctttccaggccatggcaaaaaaaatccaattatgtccgtcttgagtctgtggncttgcttcttatgtagnattncctttgtgagctgaanattaatgcatggattcacctccttcagcacatttcatttcaattgtgaagaaaagattccaggcactgaatgtaaaattgaacatgacattttgacattccttcttctgagagctgggttggtcttagttgctgtgaggctctanacaccgaccatacagggcgtggggctgctcctggacatgaacatacttacgaagttctccccaatccactttaccccgnccccgcgtacctgccccgggcgg

SEQ ID NO: 126 - DNA, 323 bp, Homo sapiens
ccgggcaggtacgcgggggcgcgacttccctggcccgccccctgcggaccagtgaacctcgcccgagggctcaataaagaagatttttgccctctttttctcacctctcagccttattgatccatggtgcccttccattgcctttcattggtgccgaaacccgggaggggacacctcctaagcccccccagaggctcagggggactcccctcctggtcggatcagtcctctccctcagtcaggtcaggcttctcctccacggccatctgtccatttcgtccggttacttgctaccaggtcgcagttgctgcagctactccagt

SEQ ID NO: 127 - DNA, 334 bp, Homo sapiens
aggtactttcccagaggaaccattcatcaagcggacactcctgcggggctggcccactcgactcacgtgaccatcagcacctaccagaacaagtaaacactgcctcccagctgcacatgctaggacagctctgagtcctggcctgcagcagccacattcaggagggatatgagggagttggcccctacctcctacgcaaaccccagggtttatgtcctttactgacttccacattcctttgatgtcccatgtatgtgactggtccctctggacttgcttctggggacatcatgaacctgactctgtaggatgtggggcattgcccaaatagaga

SEQ ID NO: 128 - DNA, 350 bp, Homo sapiens
ccgcggtggcggccgaggtacagcctgtggaactcttgaaacatggattttttcctaataattgaagacggttcaagaaaatatcttctacaagaaaatatgcaactaggagtcctgcaatgaaccgttgtttgctttcttcaatatcaattataataatattttatctttaaaatcagaattttaccgaaacagttttgtcattttattatttaactgatgagaaaaactatatgtgatttagagttgccatgagtcctgattcaaatcagattacttttcttttgctaaaaacttagcgcagtagcccacctacaatcctgcttgcttaaggggaaatggtacctgcc

SEQ ID NO: 129 - DNA, 395 bp, Homo sapiens
ccccgtaataccgacctcactatagggcgaattggcagctccaccgcggtggcggccgaggtaccccaaacaagttttcctattttatttttatgcttacagatactcaaatattaacaatttaattaatcaccagctattaaaatcatgaaaacatcatgaacacacactaccggtgtggatctccacagtgctgagtttttagatgacattccctacaccccttcctctatgaagagtttcacaaaagacgtctttagaaggtaaatctagcctatgaaatattttaagcaaaagacagaaagaagtctcaaatgtatgtggtgtatgtggggtgtgtgtgtgtgagagagagagagagaaagagagagggaaagaaagacacagagacagag

SEQ ID NO: 130 - DNA, 597 bp, Homo sapiens
  misc_feature 493, 563: n = A,T,C or G
aggtacattttgaactcccaattcccacccacagagcttggtgctagctctgcacacggtagatataagcaagaacttaggccgaagtgaattgaatgacccattcttaccagataattctgttcttgcaggggtatttcggatctgggttctgcctcaaggctgacggaatcaatacattcagcaagtgtatcctcagtcacgtctccattgagagggggctccagggcgttggcatcctgaggctgcacagggggcccaatggcggcagcccctgcaccctgcacagctgcattttcatgcccctcccctctggggtcagctggtgttggctcatgtgaaactgcagctgaatcacaatgcacttctggcatcctcaggtaaagaatcactattaggcatctcagtaacttctgctttgtctccagtggctaaggtgtcacccagcatcatcagaacatttttagtatcgctcaaggcggcccgctctagnaactagtgggatccccccgggctgcaaggaattccgatatcaaagcttattcgatacccgtcaaccctcnaaggggggggccccggtaccccaacttttttgtt

SEQ ID NO: 131 - DNA, 238 bp, Homo sapiens
tgcttctgctatggcgaggagtcctcggcctccagccactgtgcccacgcctaccggttttctggggatgttgccaccacctctgaagagtgaaaccaagctttccatgcaggaagagccaggtgctgggggctcccgcccgaactgtgaggcccacagtgcttagggagagcaccaggctctacctttctttcttgacagtgggtgagcagcgcaggcagagatgtgcaaggtacct

SEQ ID NO: 132 - DNA, 351 bp, Homo sapiens
ggaccgagggtttggtgcacctcgatttggaggaagtagggcagggcccttatctggaaagaagtttggaaaccctggggagaaattagttaaaaagaagtggaatcttgatgagctgcctaaatttgagaagaatttttatcaagagcaccctgatttggctaggcgcacagcacaagaggtggaaacatacagaagaagcaaggaaattacagttagaggtcacaactgcccgaagccagttctaaacaattatttttactaaaatgcataattatgtgatagttatacatataccaacctgttatgtgagacaagctgacctgcaagtagtccaaggccagtgaatca

SEQ ID NO: 133 - DNA, 353 bp, Homo sapiens
aggtacacgtctctgtctgggcctcggccagggtgccgagggccagcatggacaccagggccagggcgcagatcaccttgttctccatggtggccattgcctcctctctgctccaaaggcgaccccgagtcagggatccccgcgtacctgcccgggcggccgaggtaccagccgctcatgtttttatcgcacccctgggaccctgctgagttctctgtgcttcggaagggttcatccaggagggtgtaattctgacaggggtcaaaacagacatgagcctctggggtgccaggagctccgcagtccaggtccagcccatacgaactggcttcaatggggtttccataacctcg

SEQ ID NO: 134 - DNA, 544 bp, Homo sapiens
  misc_feature 544: n = A,T,C or G
aggtacttgagcctaggcaacagagccagactcagtcctttaaagaaaaaaaaaaattctcccaacttcataagtaaactgcctaaacaaatcaggattcattttaccattcatttagcagaagaggaaggtaacagaagttcatatatttcgccagataactttatcaccctccaacccagactagaggttttgatttaattatctcaaatgaactttaattattttgaacttatgattaccataatacctcttgttagaaaagtgagatttctaaaacctagtaagtaatcgtaaaggtataattttaccaccagtaatgcaagttcttaacagctgtcttggcctcaggggtcataaactaatggcctcagtaataaaatatttaatagaaattaatgagataggcccaatgatgtgggccaagtaaagagaggagaaataagaattggtgggaactgtggcaaatcggagagagtatgcacatctaaagggactcagagcaggttaattccagcccctgtataccccgcgtacctgcccn

SEQ ID NO: 135 - DNA, 150 bp, Homo sapiens
  misc_feature 147: n = A,T,C or G
ccgggcaggtacaaggggcattgtcagtgagtggtaatactttgaaaggaatcttatttcttgagcagtagttgtcgacagtgggcttaagatattcaataaaccatatttgtaaaccggaaaaaaaaaaaaaaaaaaaaaaaagtncct

SEQ ID NO: 136 - DNA, 546 bp, Homo sapiens
ggcaattggagctcaccgcggtggcggccgcccgggcaggtacgcggggggtcccagcgtcgctccggacgctgccaacctgttctccaccgtcgctcgacttccacctctaagactcccaccttcaagatccttctgtctagtgttttgggttccctacaccaggattgtggaggaagcgcacggccagaacccgttgggaccgagcagatcaaccatttatgttgcacttaatgatcatctgcactttttgcatatccttagtgttgtctttgtgaggccacctctataatggataatcaaatagagggaagggcgggattgaatattgtgacttgatttcaatgtcccacaacaactgtgctagacagtttttatatgttaggttatttaacgctcccaagcacttattaaagtgatgttactctgtttcattctccaggaaactcaggttgaataattcatcaaattacacaactgaactcaaagacatggctgcccagtgtgtcacaaaggtggtgctgaatgtttcccgtgccaatcttt

SEQ ID NO: 137 - DNA, 546 bp, Homo sapiens; identical to SEQ ID NO: 136

SEQ ID NO: 138 - DNA, 418 bp, Homo sapiens
ccgcggtggcggccgaggtactgggaatgggaagttttctgaataagggtaacatggggcagaatttgtctattgaggtgcaacattatgtgcatttgcttaaagttttacttaaacaaactggtgctcaggttagttctcaaacattaattaagatgctgaagaaggtcactatacataacccgtggtttccacagacaggcagtcttgatgtagaaatttgggacagagtaggaccaggattaaaacgggctcaccaaaaaggtcttaaatttgatctttttgttttttctgcttggagtttagtccgtgctgtcctcctgccattatcttcttcttattctgctagacagcaggaatcatattccgagtctaaaaatctgaaaaaatattttgtcccacccacagtacctgcccg

SEQ ID NO: 139 - DNA, 229 bp, Homo sapiens
ccgggcaggtacgcggggtaactttttaactttataaacttagtattttaactttttaaacttttttgttgaaaactaagacacaaaaacacatgttagcctagatccacacagggtcagggtcatcagtatcactgtcttccacctccacattttgtctctggaaggtcttcaggggcaataacacacatggagctgtcatcgcctgtggtaacaacgcagagtacct

SEQ ID NO: 140 - DNA, 149 bp, Homo sapiens
  misc_feature 146, 148, 149: n = A,T,C or G
ctactataggggcgaattggagctccacccgcggtggcggcccgccacagtcgctgcggaggggtctgaggacaggcggtcctgactcccgctgcccggtggaactaagaccagggacgaggccacgcaggagatcaaggtacctntnn

SEQ ID NO: 141 - DNA, 389 bp, Homo sapiens
ccgcggtggcggccgcccgggcaggtacaagcagtaattgattcactggccttggactacttgcaggtcagcttgtctcacataacaggttggtatatgtataactatcacataattatgcattttagtaaaaataattgtttagaactggcttcgggcagttgtgacctctaactgtaatttccttgcttcttctgtatgtttccacctcttgtgctgtgcgcctagccaaatcagggtgctcttgataaaaattcttctcaaatttaggcagctcatcaagattccacttctttttaactaatttctccccagggtttccaaacttctttccagataagggccctgccctacttcctccaaatcgaggtgcaccaaaccctcggtcc

SEQ ID NO: 142 - DNA, 253 bp, Homo sapiens
cgtaatacgactactataggggcgaattggagctcaccgcggtggcggcccgaggtacctgttggcttcatttctcttattaccctgttgccaggccaccgggtccggcccagccttgattcttcgggaatcacttctccctcgccgcgcctgttactgcctccacggatcactcatcctcgcttcgcgttcttccactaaagaacctggggcgccgcactacagcgccgcggcctccccgcgtacctgcccg

SEQ ID NO: 143 - DNA, 369 bp, Homo sapiens
cgaggtactagcagtaattgattcactggccttggactacttgcaggtcagcttgtctcacataacaggttggtatatgtataactatcacataattatgcattttagtaaaaataattgtttagaactggcttcgggcagttgtgacctctaactgtaatttccttgcttcttctgtatgtttccacctcttgtgctgtgcgcctagccaaatcagggtgctcttgataaaaattcttctcaaatttaggcagctcatcaagattccacttctttttaactaatttctccccagggtttccaaacttctttccagataagggccctgccctacttcctccaaatcgaggtgcaccaaaccctcggtcc

SEQ ID NO: 144 - DNA, 207 bp, Homo sapiens
  misc_feature 10, 11, 27, 31, 39, 41, 44, 47, 54, 55, 61, 72, 73, 76, 80,82, 83, 84, 86, 93, 98, 103, 104, 109, 112, 113, 122, 124,126, 134, 139, 145, 151, 155, 161, 163, 165, 167, 168, 169,171, 173, 176, 177, 178, 179, 184, 187, 188, 191, 193: n = A,T,C or G
  misc_feature 194, 195, 198, 201, 202: n = A,T,C or G
aggtacttgnnccaaatgtgcaacatnaatncggaaccnangancanaagactnnttaccnatactggaacnnggncaantnnnancccacgngaatnttctnngtcanatnnccacatccncncngtgctgcngaggntgtgcngactgnactncttgtncnanannngncnttnnnnctctnccnnacngnnnatnccnntgccc

SEQ ID NO: 145 - DNA, 134 bp, Homo sapiens
  misc_feature 1, 18, 29, 38, 42, 48, 52, 53, 54, 57, 60, 63, 70, 72, 77,78, 90, 108, 114, 122, 130: n = A,T,C or G
ngaacatcaacttttgancttttagtganggtatatancgcnctcggncttnnnatnganatnccttgtnantgtgnnaaatctgtatcncgcttacaataactaccnacgtangcagccgngagcatangagc

SEQ ID NO: 146 - DNA, 338 bp, Homo sapiens
  misc_feature 1, 154, 187, 317: n = A,T,C or G
ncgcccgggcaggtacaggtatttgttgcattattctaacaactttactgcagatttcactttttcaaaactaaaagttgagggaaggggaaacaccaaaaaaccctcccacggccactcgccctgcttgggctgctgctttttgagatctcanaaagttggacaagggccatgaccagcagcctgntccaaaacaacaactaggaacctgctgtgggtcacaagcttgggaagctgctgggggcagatttcactttgtgcttctgggtgagggcaggggcgtgagggtgataaaatacttttgtgagctgaacagnggggaaacaaaagtttcaaaa

SEQ ID NO: 147 - DNA, 567 bp, Homo sapiens
  misc_feature 533: n = A,T,C or G
ccgcggtggcggccgaggtaccttctcacacctgcgttcttttcttgagagatactgtgataaaataaacagtgagattcccccactccctttcccttcatcaagagaacaccacagttttctcaagctgtgcctgaagctctttcaaatcaccttgctcttgcacttgcgggaggggtagctaccagcattctcgggaggcaggcaggtccacttcgaaatttgctcttcagactgatggactcaactgtcccagatgaaatccaagagtaatgaagatattctaaattggatagtggtgatggttgcacaactctgaatagactaaaaaccattgaattttatactttcaagaggtgaattctgtggcatgtggattatatgtcaatttgaaaaaaaaaaataaactgacttttcaagtagagggacatatcccctcaaatggggttggaggaatatcctggtggtgagtaggaactgtgatgatttaatatttatcagaaacggggtagtgtaagattttgaaaagggtnaaaagtacctgcccggccggccgctctagaacta

SEQ ID NO: 148 - DNA, 190 bp, Homo sapiens
cactacttagggcgaattggagctccccgcggtggcggccgaggtacactcttccttaagtccagtggtgcaggaaagcttcagtttgtcaatatcacgcaagacagggacaccaaacactacccctgcccaaaggagcccctcacggacgccgccatgttgttaccggacccccccgcgtacctgcccg

SEQ ID NO: 149 - DNA, 157 bp, Homo sapiens
acttagggcgaattggagctcaccgcggtggcggccgaggtacgcgggggaggaactgctcagttaggacccagacggaaccatggaagccccagcgcagcttctcttcctcctgctactctggctcccagacaccactggagaaatggtgatgacg

SEQ ID NO: 150 - DNA, 60 bp, Homo sapiens
gtcacgatattactacccacttagcctggtacctgcccgggcggccgctctagaactagt

SEQ ID NO: 151 - DNA, 45 bp, Homo sapiens
tagtgagggttaatttgcgcgcttggccgtaatcatggtcataag

SEQ ID NO: 152 - DNA, 382 bp, Homo sapiens
  misc_feature 76, 77, 100, 101, 143, 149, 154, 155, 184, 230, 305, 354,356, 358: n = A,T,C or G
acttagggcgaattggagctccccgcggtggcggccgcccgggcaggtacgcgggattcctggctttttaactttnncaaatgtaacctcccatgtgctnngagaaaggaaaatttaagacagcttatgaaagggaggagaancaacanatggnncaggtcacccaaatgccaaccatgaaagngctcattttctaggctaaaaattgaacctgaactcaggccaccatngtgaaaagacaaagccttaactgctaagctacacgcattgggcagtttccactgcttttcccagaaggagcccanagcagggaattttgagcttgcaaaggcttttaactgctcaagataattngnanagctaactactaccccaaaatccc

SEQ ID NO: 153 - DNA, 186 bp, Homo sapiens
ctacttagggcgaattggagctccccgcggtggcggccgaggtacgcgggaagatctacactattatgtcaccccagaaagtgaactctcagtcttcccagccagtctctttcttatcataggttagcttgcttattctggaatttcgcgtatacagatgcatgccatgccataggtacctgcccg

SEQ ID NO: 154 - DNA, 151 bp, Homo sapiens
  misc_feature 22, 77, 90, 97, 99, 103, 107, 108, 113, 114, 116, 151: n = A,T,C or G
gggctattggttgaatgagtanggctgatggtttcgataataactagtatggggataaggggtgtaggtgtgccttntgctaagaactgngctaggncntttncaannttacnncnaaagcctataatcactgcgccccccgcgtacctcn

SEQ ID NO: 155 - DNA, 137 bp, Homo sapiens
  misc_feature 22, 46, 52, 56, 59, 86, 100: n = A,T,C or G
cgggctgcaaggaattcgaatntcaagctttatcgatacccgtccnaccttntatngtngtgggcccgggaaaccccaaatttttngcttccccttttanatgaaggggttaaatatgccgccgccttgggccgtta

SEQ ID NO: 156 - DNA, 385 bp, Homo sapiens
  misc_feature 64, 221, 222, 231, 365, 374, 385: n = A,T,C or G
ccgcggtggcggccgaggtacaagcagtaattgattcactggccttggactacttgcaggtcancttgtctcacataacaggttggtatatgtataactatcacataattatgcattttagtaaaaataattgtttagaactggcttcgggcagttgtgacctctaactgtaatttccttgcttcttctgtatgtttccacctcttgtgctgtgcgcctanncaaatcagnggtgctcttgataaaaattcttctcaaatttaggcagctcatcaagattccacttctttttaactaatttctccccagggtttccaaacttctttccagataagggccctgccctacttcctccaaatcgaggngcaccaaancctcggtcccn

SEQ ID NO: 157 - DNA, 150 bp, Homo sapiens
  misc_feature 7, 60: n = A,T,C or G
tggaacnccaccgcggtggcggccgcccgggcaggtacctttttgccctgcagggactgnacctgctgtgggatttgaatacaaatggtggaacacgctgcccacaaacatggaaacgaccgttctcagtgggatcaacttcgagtacct

SEQ ID NO: 158 - DNA, 345 bp, Homo sapiens
ccgggcaggtacccagggaacaaatgctactgggactccacacctacctaagaagcagctctacccagactccacatggctctctgttttggtctggagaccccagctggggtatctcctgagcccagggattcaaaggttcgtggcagaaatatgcatcccacgggactctcactcactcaccattttcttgtagggggattcccctgggtctgtgccactcctgggtgaatggctgatctgtctcactcttctccgtgatccgaaggtcacactatgtcactgatgaatccttatgtgtccacctggatgttccggttgaagagctagtgtctcaccactctt

SEQ ID NO: 159 - DNA, 189 bp, Homo sapiens
cgcccgggcaggtactctccctcttttcctagggatgtggcttcctgagagccaagttgtagtgactgtcatctctcttgtggatctagccacccagcaggtctaccaggctctgggctggtgctgggggttgtctacactgggtcctgtgatgtgaaccatctgcagatttctcagctatgggtacct

SEQ ID NO: 160 - DNA, 308 bp, Homo sapiens
ccgggcaggtacctgccacatgtcgggccggtcagcacaggttttctgcagggcttctggctgggctggcaaaaagcagcagggagcaggacaaagctttttttctggcctgactcccccttgctgagcccagcgctgccacctgggtggatggtccccggggccctattcccagttgctccagagccactatttaggatccaggttgtgccaccaagttcaaggctggttgtgatggtgagaacagctgctttcatagaaaaatcatcatgtcctagcacagatggccccaagcaggggaagtacct

SEQ ID NO: 161 - DNA, 77 bp, Homo sapiens
ccgggcaggtaccaagcagaaacctggccaggctcccaggctcctcatctatggtgcatccaccagggccactggta

SEQ ID NO: 162 - DNA, 201 bp, Homo sapiens
  misc_feature 181: n = A,T,C or G
cgcagtataataactggcctccgaccaccttcggccaagggacacgactggagattaaacgaactgtggctgcaccatctgtcttcatcttcccgccatctgatgagcaagttgaaatctggaactgctctgttgggtgcctgctgaataacttctatcccagaaaaggccaaagtacctngggccgctctagaactagtg

SEQ ID NO: 163 - DNA, 392 bp, Homo sapiens
aggtacaagtcataatctcttttcaagccggcctagccccttcccggaacctcggctcccccccaacgaaactactgctaagccaactggactacacttcccagactgcttggagcctctctctccgcagaacctcgtcttccgcgagcttttcctggaggttctaggagggatgcccctcaatgccacgacgccatttcctactacccccgcgtacctgcccggcggccgcccgggcaggtacagcaaaacccacctgtgtaaacacacacagcaaagtgatgtaagaagtttccatataaagggctgcagtatggagaggtaatgtgcaggctggtttgcggctgtaggggccaccttgctgcagctctccactgatatggtacctcggc

SEQ ID NO: 164 - DNA, 285 bp, Homo sapiens
ccgcggtggcggccgcccgggcaggtaccgcagcagagcactctcagctctgggtcttgcaggcgcagggctcccccatgccagcagaaagatttcctctggacaggcgacactaacaggtgaagatctcgggagaccatgactaagaaaagaattgctgtgattgggggaggagtgagcgggctctcttccatcaagtgctgcgtagaagaaggcttggaacctgtctgctttgaaaggactgatgacatcggagggctctggaggttccaggaaaatcctgaa

SEQ ID NO: 165 - DNA, 383 bp, Homo sapiens
ccgcggtggcggcccgaggtacaagcagtaattgattcactggccttggactacttgcaggtcagcttgtctcacataacaggttggtatatgtataactatcacataattatgcattttagtaaaaataattgtttagaactggcttcgggcagttgtgacctctaactgtaatttccttgcttcttctgtatgtttccacctcttgtgctgtgcgcctagtcaaatcagggtgctcttgataaaaattcttctcaaatttaggcagctcatcaagattccacttctttttaactaatttctccccagggtttccaaacttctttccagataagggccctgccctacttcctccaaatcgaggtgcaccaaaccctcggtcc

SEQ ID NO: 166 - DNA, 480 bp, Homo sapiens
  misc_feature 417, 423: n = A,T,C or G
tcctatagggcgaattggagctccccgcggtggcggcccgaggtactcaaaggtgatatttgcttttttcaatgcttcaggggaaaaatccttttctttacaaacttccatcagtttaggagtcagtctgtatgcctttagtgagagagatccttgggcagtttttatgggatcataaatgagaacgacagattcttcaatggcatgctggtaactaaactgagagtccgggagtgcccgggtaacgaatgagccatagtatgtggactgataccagcccacgtgaagatgatcaatgtttacatggcgaagctccgcatcatttccatcttgatattggacagaacctctagctgagcttgtcctcttcacactgagtaatgggttatgtttcttccctgagggcctaaacttttnatttgntcttattaaatattattctcttttaaaagcttctaaatttcaactggccctgattac

SEQ ID NO: 167 - DNA, 389 bp, Homo sapiens
cggccgaggtacagtgcagaggactggaatggatataatgtctgcaaaacaaaaacatgtctagtgagccatctactaatctcaaccactggtctaactcatgacagtctcaaaatgaatatttaagaaaaaagtagtggcatctaaaaatatagacgttttgcaactgactcagggagagctctttcttcaactactgaatatactggttttaaatgatggagtgagacaaagaggctcttgctgacgtgctctactttgatttctatcctaaaatctaacaggtaatcaatgtgtttggctacctataggagcatccaccaactgatatcatttttttttttttttttgagatagagtctcattctgtcacctaggctggagggcag

SEQ ID NO: 168 - DNA, 397 bp, Homo sapiens
  misc_feature 323, 336, 389: n = A,T,C or G
ccgcggtgggcggcccgcccgggcaggtacaagcagtaattgattcactggccttggactacttgcaggtcagcttgtctcacataacaggttggtatatgtataactatcacataattatgcattttagtaaaaataattgtttagaactggcttcggacagttgtgacctctaactgtaatttccttgcttcttctgtatgtttccacctcttgtgctgtgcgcctagccaaatcagggtgctcttgataaaaattcttctcaaatttaggcagctcatcaagattccacttctttttaactaatttctccccagggtttncaaaacttctttncagataaggggccctgccctacttccttcaaatcgaggtgcaccaaaccctcngtcccggc

SEQ ID NO: 169 - DNA, 495 bp, Homo sapiens
  misc_feature 446, 448: n = A,T,C or G
ccgcggtggcggcccgaggtacgcgggtccccatgtgtgacgccggtgagcagtgtgcagtgaggaaaggggcaaggatcgggaagctgtgtgactgtccccgaggaacctcctgcaattccttcctcctgaagtgcttatgaaggggcgtccattctcctccatacatccccatccctctactttccccagaggaccacaccttcctccctggagtttggcttaagcaacagataaagtttttattttcctctgaagggaaagggctcttttccttgctgtttcaaaaataaaagaacacattagatgttactgtgtgaagaataatgccttgtatggtgttgatacgtgtgtgaagtattcttatttatttgtctgacaaactcttgtgtacctgccccgggccggcccgttctagaaactagtgggatccccccgggcctgcnangaaattcgatatcaagcttatccgataccgtcgaacctcgagggggg

SEQ ID NO: 170 - DNA, 433 bp, Homo sapiens
  misc_feature 367, 423: n = A,T,C or G
cgcccgggcagggtacttggattacaggcgtggaccagcatgccatgcctatagtgatatctttaagtaaccctctcttttcttcttttgagcaatttttcaaagcaacaggcattttattaaataagaaagtcgatgtgctttcctaatgcctgttaataaagtaaggagccaaggaacctctgtgatttcaatgaaatccctccagatattataggctacttgttactgacaagtatggcaggaactgcaggtcaagctgtgataggcaaatagatcttgctgaagaggaagaatgattggctaagataatgccccaagacagctggcatacctttagacacagctaaattgaatgctttctgangaggagtgtattaagtctgtctcacactgatataaagacatacctgagaatgggtnattgaaaaaa

SEQ ID NO: 171 - DNA, 357 bp, Homo sapiens
  misc_feature 127: n = A,T,C or G
ggtctcggtcactcgaataacccgacatggcgtcaatggttgcggttggcggggaacgaagtatatagaaaagcgtgcgacaagtcgctggaaatggcctcgatgacggcgaagccttgcgggggcnggcagcggaggaaggacaccgatgacaccagccgaagctgcactactagagaccggtagaaatgaatgaggtccccgcgtacctcggccgcccgggcaggtacaatgcaaagtataggcttttgaactaaattggcctgggttcaaatatgagccctctcacattctattaggttgaaccatataaaaatggagatattcaatcatttttttacagtttcacgtagttca

SEQ ID NO: 172 - DNA, 272 bp, Homo sapiens
ccgggcaggtacctttggttaagagtagacaaggcagacatctgagcctgcatgactcagcaagtttagggtgcaggcacatactccacttgttgtataacctgtttgtgtaagctgatacttgccttggagccactattgtctgtaaaaggtataactgccctgctgacactgtgcatgggggacatggcttggcttggctcttgggcatggcttgacatggctcttgcgctcatgcccagagagagaaggagataaactgctgaccctga

SEQ ID NO: 173 - DNA, 294 bp, Homo sapiens
  misc_feature 19, 50, 57, 85, 88, 131, 179, 227, 241, 250: n = A,T,C or G
ccgggcaggtacttggatnacaggcgtggaccagcatgccatgcctatantgatatntttaagtaaccctctcttttcttctttngancaatttttcaaagcaacaggcattttattaaataagaaagtcnatgtgctttcctaatgcctgttaataaagtaaggagccaaggaacctntgtgatttcaatgaaatccctccagatattataggctacttgttactngacaagtatggcangaactgcangtcaagctgtgataggcaaatagatcttgctgaagaggaagaat

SEQ ID NO: 174 - DNA, 389 bp, Homo sapiens; identical to SEQ ID NO: 141

SEQ ID NO: 175 - DNA, 428 bp, Homo sapiens
cgcccggcaggtacgcggggagagggagctgggcagggcacagcagggcaggagtgtgtttgatgtgtcctgggaaccgccctgaggccgtcgtgtggctggagtgctgcaggtgtcaaggaaattgtaggagatgtctcctgagtgtgatggaatataaccagatttccagaaggaactgacatgatctgacttaaaaaggccacctacatttacatgaaggccgcctacctcagcatgtttgggaaggaggaccacaagccgttcggggacgacgaagtggaattatttcgagctgtgccaggcctgaagctcaagattgctgggaaatctctacccacagagaagtttgccatccggaagtcccggcgctacttctcctccaaccctatctcgctgccagtgcctgctctggaaatgatgtacct

SEQ ID NO: 176 - DNA, 422 bp, Homo sapiens
ggggccattgagactgccatggaagacttgaaaggtcacgtagctgagacttctggagagaccattcaaggcttctggctcttgacaaagatagaccactggaacaatgagaaggagagaattctactggtcacagacaagactctcttgatctgcaaatacgacttcatcatgctgagttgtgtgcagctgcagcggattcctctgagcgctgtctatcgcatctgcctgggcaagttcaccttccctgggatgtccctggacaagagacaaggagaaggccttaggatctactgggggagtccggaggagcagtctcttctgtcccgctggaacccatggtccactgaagttccttatgctactttcactgagcatcctatgaaatacaccagtgagaaattccttgaaatttgcaagtt

SEQ ID NO: 177 - DNA, 540 bp, Homo sapiens
  misc_feature 491, 530: n = A,T,C or G
gcggcccgaggtactgtccaactggatgctgccctggtggctgaaggcacacttcatgatgctgtccagggtcatcagggagacatgttgaaagagctccagacgtgagttttgggcaatgtgttcctcccatttgttcagcatcatccgaacactctcagacatcatggtgatgaatattttcagaatgctgatgttgaagccaggtttcacaatctggcggtgctttttccatttagaaccatccagggtcacaagtcctcgaccaacccaggattcaaggattttgtggctaacagcacttttgggatcttgtcttttcgggagaatcttggcatagtctgggtcatggacactgaagaacatcgtaaagggtccaacccacaagggaacagcacatgggtatttttccatcagcttatgatacacctcaaactcctttactgggtaaaactccttgtggccataaaccaagtgggcagggggtgcangaaaacaggtgcagggctctgaacatccatctcctcctntggtacctgc

SEQ ID NO: 178 - DNA, 304 bp, Homo sapiens
  misc_feature 4, 54, 68, 126, 127, 132, 137, 143, 145, 149, 151, 169, 176,180, 181, 232, 259, 261, 263, 264, 266, 270, 273, 277, 288,304: n = A,T,C or G
aatnggagctcccccgcggtggcggcccggccatggaggctgatggggccggcnagcacatgagaccnctactcacccggggtcctgatgaagaagctgttgtggatcttggcaaaactagctacnntgtgnaaccnaagttnanacanangaacttgaagagtcatanagctgtntatnntggagttcacgtcccgtttagtaaagagagtcgtcggcgtcataggcatcngtgacacaaacatcaccaccaaaacgnangnnanatanttnaaanaaaagtcctcngccgctctagaactan

SEQ ID NO: 179 - DNA, 332 bp, Homo sapiens
  misc_feature 28, 33, 43, 53, 70, 75, 81, 83, 84, 88, 97, 102, 119, 128,135, 136, 140, 148: n = A,T,C or G
ggagctccccgcggtggcggccgacgtncaagnatctgttgcntgcacatctncgatagccaacgcctgnccatnattggncnnatanaaaccctcntgctncatgatacctacagganaaacacaanctcggtnngctnttcgagtnctgaaaggtgtgaataagttaccaccaccaagtgtcatgatagaggaaattaatgcaaggaaagaaaacaagcccagttgttccgcttgactggcccaggaaaatgggaaggagccagaaatgccatcatgacccagtgggaccgaacattcaaggtcatcaaagctcgagttgtacctgcccg

SEQ ID NO: 180 - DNA, 662 bp, Homo sapiens
  misc_feature 493, 505, 507, 527, 540, 581, 592, 611, 618, 623, 625, 635,638, 639, 640, 646, 662: n = A,T,C or G
ccgcggtggcggcccgaggtacccagggaacaaatgctactgggactccacacctacctaagaagcagctctacccagactccacatggctctctgttttggtctggagaccccagctggggtatctcctgagcccagggattcaaaggttcgtggcagaaatatgcatcccacgggactctcactcactcaccattttcttgtagggggattcccctgggtctgtgccactcctgggtgaatggttgatctgtctcactcttctccgtgatccgaaggtcacactatgtcactgatgaatccttatgtgtccacctggatgttccggttgaagagctagtgtctcaccactctttctgctatttgtgagaagtggcacacactagctgcttctagtcaaccatcttggccccacctcactcacttttctcaagtaatcaaagaccagaaaggatgtcctttacaagaagcagatcccccaaaatgtaagaantcacttgaaaangnggggagctcaaacccaaganaaggacttatctngcagcataaaaaacaacttgtacctgcccgggccgggccgntttagaactanagggatcccccgggctganggaattnatttnancttattgatnccnnngacctnaggggggggcccggtn

SEQ ID NO: 181 - DNA, 413 bp, Homo sapiens
  misc_feature 81, 85, 89, 90, 104, 110, 112, 144, 145, 153, 158, 166, 174,197, 200, 202, 207, 221, 222, 228, 229, 232, 235, 240, 250,268, 279, 282, 285, 290, 291, 300, 307, 313, 314, 320, 321,323, 330, 337, 339, 344, 350, 357, 366, 368, 370: n = A,T,C or G
  misc_feature 383, 384, 386, 402: n = A,T,C or G
aggtacttttttttttttttttttttttcctttttttttttttttttttttttttttttttttttttttttttttttgggncccnccannctttgattggcccncaacantnttacaaacaaaaggcattaggcaaagcatgcnnaattgatnggagncccttggncaaaggtnttattgattgacggcaatcaaanccncnccctnaaaaaggatttgannaggccnnttntgnccatntgcaaaaggntccccaaaaggggcaaanggcggggcccnggnggnagggnnccatggganttagggngacccnnaaccannantaccaanaggcctntnaggantgcaangaaaaanaggaccctnancnccatggttccagnntnactgccctgcccccgngtacctgcccg

SEQ ID NO: 182 - DNA, 93 bp, Homo sapiens
  misc_feature 9, 14, 16, 22, 26, 28, 30, 33, 42, 43, 44, 46, 50, 51, 58,60, 68, 74, 84, 85: n = A,T,C or G
ccccctggngaaanangggcanaacngntnccnggggaaaannntntccnntaaaatncncaaaatanaaaccnggaacaaaanngaaaaccc

SEQ ID NO: 183 - DNA, 485 bp, Homo sapiens
aggtacaaacttagaagaaaattggaagatagaaacaagatagaaaatgaaaatattgtcaagagtttcagatagaaaatgaaaaacaagctaagacaagtattggagaagtatagaagatagaaaaatataaagccaaaaattggataaaatagcactgaaaaaatgaggaaattattggttaccaatagaagggcaatgcttttagattaaaatgaaggtgacttaaacagcttaaagtttagtttaaaagttgtaggtgattaaaataatttgaaggcgatcttttaaaaagagattaaaccgaaggtgattaaaagaccttgaaatccatgacgcagggagaattgcgtcatttaaagcctagttaacgcatttactaaacgcagacgaaaatggaaagattaattgggagtggtaggatgaaacaatttggagaagatagaagtttgaagtggaaaactggaagacagaagtacctcggc

SEQ ID NO: 184 - DNA, 547 bp, Homo sapiens
  misc_feature 430, 501, 538: n = A,T,C or G
aggtacaagttgtctttatgctgcgagataagtcctctcttggtttgagctcccaccttttcagtgaactcttacattttgggggatctgctcttgtaaaggacatcctttctggtctttgattacttgagaaaagtgagtgaggtggggccaagatggttgactagaagcagctagtgtgtgccactctcacaaatagcagaaagagtggtgagacactagctcttcaaccggaacatccaggtggacacataaggattcatcagtgacatagtgtgaccttcggatcacggagaagagtgagacagatcagccattcacccaggagtggcacagacccgggggaatccccctacaagaaaatggtgagtgagtgagagtcccgtgggatgcatatttctgccacgaacctttgaatccctgggctcangagataccccagctggggtctccagaccaaaacagagagccatgtggagtctgggtagagctgcttcttangtaggtgtggagtcccagtagcatttgttccctgggnacctgcccg

SEQ ID NO: 185 - DNA, 42 bp, Homo sapiens
  misc_feature 1, 2, 4, 17, 25, 31: n = A,T,C or G
nnanatcaagcttatcnatcccgcnacctcnagggggggccc

SEQ ID NO: 186 - DNA, 367 bp, Homo sapiens
aggtacgcgggagattatgaaaatcgcgagtcaacacccaaactggcaaaattactgaaactactactttgggctcagaacgagctggaccagaagaaagtaaaatatcccaaaatgacagacctcagcaagggtgtgattgaggagcccaagtagcgcctgcgcttgcgtggtggatccaacaccaaccctgcgtcgtgggacttgcctcagatcagcctgcgactgcaagattcttactgcagtagagaactctttttctcccttgtacgcgggacctggacgaaggcttgtcctacacgagcatcttctatccggttgaagtttttgagagttcgctttcagatcctgggcccggaaagcaaga

SEQ ID NO: 187 - DNA, 317 bp, Homo sapiens
ggtctcggtcactcgaataacccgacatggcgtcaatggttgcggttggcggggaacgaagtatatagaaaagcgtgcgacaagtcgctggaaatggcctcgatgacggcgaagccttgcgggggcggcagcggaggaaggacaccgatgacaccagccgaagctgcactactagagaccggtagaaatgaatgaggtcccccgcgtacctcggccgcccgggcaggtacgcgggggccagcgtcaccagaccagctgcgggacaaaccactcagactgcttgtaggacaaatacttctgacattttcgtttaagca

SEQ ID NO: 188 - DNA, 299 bp, Homo sapiens
aggtactagcagtaattgattcactggccttggactacttgcaggtcagcttgtctcacataacaggttggtatatgtataactatcacataattatgcattttagtaaaaataattgtttagaactggcttcgggcagttgtgacctctaactgtaatttccttgcttcttctgtatgtttccacctcttgtgctgtgcgcctagccaaatcagggtgctcttgataaaaattcttctcaaatttaggcagctcatcaagattccacttctttttaactaaatttctccccagggttt

SEQ ID NO: 189 - DNA, 279 bp, Homo sapiens
ccgggcaggtacatttcctgagcaggtgatcctggctgtctgtcctggagacactgacactgaagatggctgtgtcagctcataggaggccacagagactgtgcagagaatgaggagggggagcaggagagggatccaggccatggtgagacattcagagctctgcctcctgagcctacagcccccgcgtacctcggccgcccgggcaggtactttaatagctcaaactcagagtcatcgtgctcccaattccaaagagattcctaaaagaggcaactt

SEQ ID NO: 190 - DNA, 630 bp, Homo sapiens
  misc_feature 547, 575, 592, 607, 612, 613: n = A,T,C or G
ccgggcaggtaccttctggggcatacaacatggcagcagggcctcgggaagaggggtaggaggaccgagcagcattctctgtagaggaagacaggaaaggagaccctcttggcacacatttatggagggttgtccctgaagagaagggcaggtgggagaggttccctgttacttaagagaaggcaccagtggcaaagagcacaatgaagaggatgatgataaaaacaatcacgcagataaggacaatcatcttcacgttcttccaccagaattttcgagccaccttctgcgatgtcgtcttgaagtgctcagatgtggcttccagatcctctgtcttgttgcggagatgttccaagttttccccccgggccaggatccgctccacattctgggtcataatattcttaactccctccacctcactttgcaggttccgcacacgatcatttcctccaccttcactggcttcctccatgtctcaaaacaagtccaagccggtcagtaaagtgaattcgcctagtcggctttcctccaaggtggccctcanttcacttcctgcttgcttcaacttttancctgcccccgcccccgngtacctttgggccgntttannaactagtggatcccccg

SEQ ID NO: 191 - DNA, 667 bp, Homo sapiens
  misc_feature 528, 538, 548, 582, 600, 655, 656, 666: n = A,T,C or G
cgcacagtaacagtaatagtcagcctcatcctcaacgtgggccccactgatggtcaaggtgactgtggtccgtgaactggagccggagaatcgctcagagatccctgagggccgctcgctgtctttatacatcactaacacaggggcctggcctggcttctgctggaaccaccgagcatctttttttgccagtacctcggccgggaccgagggtttggtgcacctcgatttggaggaagtagggcagggcccttatctggaaagaagtttggaaaccctggggagaaattagttaaaaagaagtggaatcttgatgagctgcctaaatttgagaagaatttttatcaagagcaccctgatttggctaggcgcacagcacaagaggtggaaacatacagaagaagcaaggaaattacaagttagaggtcacaactgcccgaaccagttctaaacaattatttttactaaaatgcataattatgtgatagttatacatataccaacctgttatgtgagaacaaagctganctgcaagtanttccaaggcnagtgaattaattactggttgtaccctcgggccgntctagaactaattggatncccccggcttgcaaggaattcgatattaaagcttattcgaataccggccaacctnnaagggggggnc

SEQ ID NO: 192 - DNA, 274 bp, Homo sapiens
  misc_feature 2, 25, 47: n = A,T,C or G
cncggtggcggcccgaggtactgtntaactggatgctgccctggttnctgaaggcacttttcatgatgctgtccagggtcatcagggagacatgttgaaagagctccagacgtgagttttgggcaatgtgttcctcccatttgttcagcatcatccgaacactcttagacatcatggtgatgaatattttcagaatgctgatgttgaagccaggtttcacaatctggcggtgctttttccatttagaaccatccagggtcacaagtcctcgacc

SEQ ID NO: 193 - DNA, 259 bp, Homo sapiens
  misc_feature 82, 83: n = A,T,C or G
ggcgaattggagttccccgcggtggcggccgaggtactctgcgttgttaccacaggcgatgacagctccatgtgtgttattnnccctgaagaccttccagagacaaaatgtggaggtggaagacagtgatactgatgaccctgaccctgtgtggatctaggctaacatgtgtttttgtgtcttagttttcaacaaaaaagtttaaaaagttaaaatactaagtttataaagttaaaaagttaccccgcgtacctgcccg

SEQ ID NO: 194 - DNA, 261 bp, Homo sapiens
agggcgaattggagctccccgcggtggcggccgaggtactctgcgttgttaccacaggcgatgacagctccatgtgtgttattgcccctgaagaccttccagagacaaaatgtggaggtggaagacagtgatactgatgaccctgaccctgtgtggatctaggctaacatgtgtttttgtgtcttagttttcaacaaaaaagtttaaaaagttaaaatactaagtttataaagttaaaaagttaccccgcgtacctgcccg

SEQ ID NO: 195 - DNA, 322 bp, Homo sapiens
  misc_feature 12, 16: n = A,T,C or G
cggcgaattggntttncacacgcggtggcggcccgaggtaccaaggagaagacttgaaccaaaaacaaactcttcaagtatattcattcattcaacaaaatttttgcatgccttctatgtcgtaggcatttttagttcctggggatttggacatggctaagtcagagaaggccattgctcaccatgaacactgtataccagaaggagagtggggaggagacaaaaaacaaataagaccacttcagacaatcaaagtatcagttaagagaatgaaaacaggcctgactcagtggctcacgcctgtaatcccagtacctgcccg

SEQ ID NO: 196 - DNA, 464 bp, Homo sapiens
  misc_feature 442: n = A,T,C or G
cgcggtggcggcccgcccgggcaggtacaaggcaaatactgctttatttttccttcagcttttctcaagcagaagaagtctctcactatagccaccacagctggcaatatgctgggtctcacctggagccggaaagtctcagagtctcacccaaggcccatggtatactacttggatattgctgctggttattcaaggcccaagggatctttagtcagcaggtgacgtattccgcaaggactgggtcctttccttcatggcagcaggttcccttctggcccagggtgtttctaaaaatggtttctgggagctaggaatccccactcatcaaagaggacttcaatgcaagacaaagtcctctttactcttctccctcctctcccaagaggaaggaagggtctcttttggaagtcaggagctgcattccctggggttggggaangggtagtaccttggccgctcta

SEQ ID NO: 197 - DNA, 376 bp, Homo sapiens
cgcccgggcaggtacaagcagtaattgattcactggccttggactacttgcaggtcagcttgtctcacataacaggttggtatatgtataactatcacataattatgcattttagtaaaaataattgtttagaactggcttcgggcagttgtgacctctaactgtaatttccttgcttcttctgtatgtttccacctcttgtgctgtgcgcctagccaaatcagggtgctcttgataaaaattcttctcaaatttaggcagctcatcaagattccacttctttttaactaatttctccccagggtttccaaacttctttccagataagggccctgccctacttcctccaaatcgaggtgcaccaaaccctcggtcc

SEQ ID NO: 198 - DNA, 441 bp, Homo sapiens
  misc_feature 258, 371, 375, 404, 432: n = A,T,C or G
ttaatacgactactatagggttaattggagctccccgcggtggcggccgaggtacttgttgttgctttgtttggagggtgtggtggtctccactcccgccttgacggggctgctatctgccttccaggccactgtcacggctcccgggtagaagtcacttatgagacacaccagtgtggccttgttggcttgaaagctccttcagaaggaggggtgggaacagagttgacccgagggggcagccttgggctgacctangacggtcagcttggtccctccgccgaacacccaagtgctaccatctccatatgagcagcagtaataatcagcctcgtcttcagcctggagcccatagattgtcagggtaggcncgtngttgccaggactttggagccaagagaagncgaattaagaaaaccccttgaaggggcncgcttactt

SEQ ID NO: 199 - DNA, 255 bp, Homo sapiens
ccgcggtggcggccgaggtacctacgctatcaggaggccctgagtgagctggccactgcggttaaagcacgaattgggagctctcagcgacatcaccagtcagcagccaaagacctaactcagtcccctgaggtctccccaacaaccatccaggtgacatacctcccctccagtcagaagagtaaacgtgccaagcacttccttgaattgaagagctttaaggataactataacacattggagagtacctgcccg

SEQ ID NO: 200 - DNA, 60 bp, Homo sapiens
  misc_feature 24: n = A,T,C or G
gcttttgtttccctttaagtgagnggttaaattgccgccgcttgggcgttaatcatgggt

SEQ ID NO: 201 - DNA, 210 bp, Homo sapiens
gctgttatgctcatcatggcacttaagagatgcttaacaaacctttcctacaatgttcctcagattttcagagcttatttgatctagcatctggttcctaaattctgagtcacatcagaagccaaacttgaatgcttttggaaagagctagcctcataccacttcaagttggggaagggggagtacctcggcccgctctagaaactagtg

SEQ ID NO: 202 - DNA, 93 bp, Homo sapiens
cgcttggccgtaatcatggtcatagcctgtttcctgtgtggaaattgttatccgcttcacaatttccaccaccaaccataacgaagcccgggg

SEQ ID NO: 203 - DNA, 215 bp, Homo sapiens
  misc_feature 173, 174, 177, 185: n = A,T,C or G
ccgcggtggcggccgcccgggcaggtactttttttgtgatttttgaatgcacgtgcgcaggaagggctcctcttagagaagcagtcaaactgtgaagcactaagctgaccctgcttcaagcaattttgtttttacaactgttcctttcacaagcaagccttaaaaaaaaaaannaantaaaaaanaaagtacctcggcccgctctagaactagtg

SEQ ID NO: 204 - DNA, 72 bp, Homo sapiens
  misc_feature 36, 55: n = A,T,C or G
agctgtttcctgtgttgaaattgttattcccgctcnccaatttccacacaaacantaccgaagcccggggag

SEQ ID NO: 205 - DNA, 254 bp, Homo sapiens
acactacttagggcgaattggagctccccgcggtggcggccgcggtctcggtcactcgaataacccgacatggcgtcaatggttgcggttggcggggaacgaagtatatagaaaagcgtgcgacaagtcgctggaaatggcctcgatgacggcgaagccttgcgggggcggcagcggaggaaggacaccgatgacaccagcccgaagctgcactactagagaccggtagaaatgaatgaggcccccgcgtacct

SEQ ID NO: 206 - DNA, 55 bp, Homo sapiens
cttggccgttaatcatgggtcattaggctgttttcctgtggtgaaaattgttatc

SEQ ID NO: 207 - DNA, 182 bp, Homo sapiens
aggtgcagaaaactctcctcatctggacccgtgacgtccttgcagcccgagttggccatatcccactacgcccctgcactggagcctgaagcaaagtgtaaggaacggccagagagcgcaacactggggcccactaccccggcgcaagtgacccgccgcccccgcgtacctgcccgggcggc

SEQ ID NO: 208 - DNA, 67 bp, Homo sapiens
gctgtttcctgtgtgaaaattggttatccgctcacaatttccacacaacattacgaagccgggggag

SEQ ID NO: 209 - DNA, 262 bp, Homo sapiens
  misc_feature 4, 64, 237: n = A,T,C or G
gctnattggagctccccgcggtggcggccgaggtacgcgggggagtccttggagcgctgtgttntttaccgtggtggtgactggatccaggaggtcgagagtcgttcttctctttgcacagacgtgactctgcagctctttaacggcgcccgctgctctcaacccagcttaccccacgtggtcccatggcggcggccgctctagaactaagtggatcccccgggctgcaaggaaatnctatatcaagcttatcgataccgta

SEQ ID NO: 210 - DNA, 423 bp, Homo sapiens
  misc_feature 417: n = A,T,C or G
ccgcggtggcggccgaggtacccttattcgcctctttgacacacaatccaaggagaaactggtggagctgcgccgaggcactgaccctgccaccctctactgcattaacttcagccacgactcctccttcctctgcgcttccagtgataagggtacctgcccgggcggccgcggtctcggtcactcgaataacccgacatggtgtcaatggttgcggttggcggggaacgaagtatatagaaaagcgtgcgacaagtcgctggaaatggcctcgatgacggcgaagccttgcgggggcggcagcggaggaaggacaccgatgacaccagccgaagctgcactactagagaccggttagaaatgaatgaggtccccgcgtacctcggccgctctaggaactagtggatcccccgggcntgcagg

SEQ ID NO: 211 - DNA, 450 bp, Homo sapiens
gggcgaattggagctccccgcggtggcggccgcccgggcaggtacaaagcagactgcccgcaaatcgaccggtggtaaagcacccaggaagcaactggctacaaaagccgctcgcaagagtgcgccctctactggaggggtgaagaaacctcatcgttacaggcctggtactgggaaaagatctaatctgccgtgggcctgtcgtgccagtcctgggggcgagatcggggtagaaatgcattttattctttaagttcacgtaagatacaagtttcaggcagggtctgaaggactggattggccaaacatcagacctgtcttccaaggaggccaagtcctggctacatcccagcctgtggttacagtgcagacaggccatgtgagccaccgctgccagcacagagcgtccttccccctgtagactagtgccgtagggagtacctcggccgc

SEQ ID NO: 212 - DNA, 370 bp, Homo sapiens
  misc_feature 84, 167, 170, 175, 187, 196, 224, 238, 240, 245, 251, 274,277, 318, 322, 341: n = A,T,C or G
acttagggcgaattggagctccccgcggtggcggccgaggtacccacagctgggagagagctagtgagctccagggagggtcanctgggggagtttcaccattggctgtgtcagccaatggcaaggtgtgtgaacagggaactcctgtgttgagcatagagaggaanaanatgcntccgagatgganttggggaangcaagcacttgccgtgtttgtgtgtccngagactcgggctgntnatgangagcangagggagcgtatgaagatatcanatntgcaaaggacaaaacccccacccaattacaggaccactgancctntagctatggaagtcttaantacagattgcctgggccgggtggattttc

SEQ ID NO: 213 - DNA, 432 bp, Homo sapiens
  misc_feature 359: n = A,T,C or G
tccttagggcgaattggagctccccgcggtggcggccgaggtacaccagcgaattcatacaggtgagagaccttatatatgcaatgaatgtggaaaaggcttcattcagaagacgtgtctcatagcacatcagagatttcacacaggaaagacgccctttgtgtgcagtgaatgtggaaaatcctgttctcagaaaatcaggtctcattaaacatcaaagaattcacacaggagagaaaccctttgaatgtagtgaatgtgggaaagcctttagcacaaagcaaaagcccattgtccatcaaaggactcatacaggagagagaccctatggctgtaacgagtgtgggaaagcgtttgcngtatatgtcgtgtctggttaagcataagagaatacacacaagggagaaacaagaggcagccaaggtggaaaat

SEQ ID NO: 214 - DNA, 330 bp, Homo sapiens
  misc_feature 136, 137: n = A,T,C or G
ccagcagaagccaggccaggcccctgtgttagtgatgtataaagacagcgagcggccctcagggatctctgagcgattctccggctccagttcacggaccacagtcaccttgaccatcagtggggcccacgttgannatgaggctgactattactgttactgtgcggccgcccgggcaggtacgcggggagtcgggccgcgccgcgcctcagctctggttgatgataattagaagcatgctttccactgaacttcccgacaacatttgttatgcagaatgtctctgagtgagaactcggtttttgcctatgaatcttctgtgcatagcac

SEQ ID NO: 215 - DNA, 172 bp, Homo sapiens
  misc_feature 2, 109, 147, 172: n = A,T,C or G
ancaactaaccgctccgtgaactccacatcgttctcaaattctgggaagtgttccatctcaattccaaccatgaggtacctgcccggacctgcccgggcggccgctctngaaactagtaggatccccccggggcttgcatggaattngatatcaaagctttatccgataccn

SEQ ID NO: 216 - DNA, 460 bp, Homo sapiens
  misc_feature 337, 347, 374, 406, 417, 435: n = A,T,C or G
aggtacttgttgttgctttgtttggagggtgtggtggtctccactcccgccttgacggggctgctatctgccttccaggccactgtcacggctcccgggtagaagtcacttatgagacacaccagtgtggccttgttggcttgaagctcctcagaggagggcgggaacagagtgaccgagggggcagccttgggctgacctaggacggtcagttttggtccctccgccgaacacccaaatgccattactcgagccggccgcccgggcaggtaccgcgggctggtgacctcagccaagaatgaattcaggccatccggctacaaggccaaaagctttncccagcttanctactttgaaccaccctgctttctggntttttctggtttccacttgcaaaaattgggangggtgttttgntcctttttcccttgggcnttccaaacaattcaaattttaaaaa

SEQ ID NO: 217 - DNA, 261 bp, Homo sapiens
  misc_feature 239, 255: n = A,T,C or G
ggcgaattggagctccactcgcggtggcggccgaggtactgtccaactggatgctgccctggtggctgaaggcacacttcatgatgctgtccagggtcatcagggagacatgttgaaagagctccagacgtgagttttgggcaatgtgttcctcccatttgttcagcatcatccgaacactctcagacatcatggtgatgaatattttcagaatgctgatgttgaaagccaagggtttnacaatctggcgggtgntttttt

SEQ ID NO: 218 - DNA, 398 bp, Homo sapiens
  misc_feature 234, 253, 281, 311, 367: n = A,T,C or G
ggcgaattggagctccccgcggtggcggccgcccgggcaaggtacattcttctcagcaccttagagcccactgatgcaggcatactgggaacgactaaggactcacccaagctgggtctgctcatggtgcttcttagtatcatcttcatgaatggaaatcggccagtgaggctgtcatctgggaggtgctgcgcaagttggggctgcgccctgggatacatcattcactctttnggggacgtgaagaagctcntcactgatgagttttgtgaagcaagaanttaccctcgggccgctctagaaactaagtnggatcccccggggctgcaggaattcgatattcaaggccttatcggattaccgtctnaccctcgaaggggggggggccccgggtaccc

SEQ ID NO: 219 - DNA, 380 bp, Homo sapiens
aggtacaggacacaatgcccccagaaaagtaacagccgtcatttatgctagaaaaggaagtgtcctccagagcatagagaaaataagttcctctgttgatgcaacaactgttacttcacaacagtgtgtttttagagaccaagaaccaaagatccataatgagatggcatcaacatcagataaaggtgcccaaggaagaaatgacaagaaagattctcaaggaagaagtaataaggcattacatctgaagagtgatgctgaatttaaaaagatatttggccttactaaggatttgagagtgtgccttactcgaattcctgaccatttgacctctggagaaggtttcgattcctttagcagtttggtaaagagcggtacct

SEQ ID NO: 220 - DNA, 195 bp, Homo sapiens
cgaggtacacaagctcctgcatcagtgcaggactcagtccctgagtgctgggcctgtcacagacatcgccttctttactcccacgcagccaggttgacaatcacagaccctttctacagggaacctaagacaccaatttaacctggccaggctgagctagtgggtcacaagcttgaaatctgaggtacctgcccg

SEQ ID NO: 221 - DNA, 286 bp, Homo sapiens
  misc_feature 67, 70, 265: n = A,T,C or G
aggtaccaatgtcttggggggagggagccagctgattgtgagatgtaagtttgtgattctgagatancanctttgcaaaaaactgcaatttgtcaattcaccaatattgataatgtgcaagcttggtgagctgagaatattcctgaaaacctttgttcccactgcgaattcctggggacagttatgagttcctaatgacgtcaccacaaagacattttggagtgtttggtaaaggctgtttcttttcagtgattgctggaagcanatgggatcaaataaaaataga

SEQ ID NO: 222 - DNA, 372 bp, Homo sapiens
aggtacagagtggaccatcttatgaggccaaaaacccatgagttaccagatgaccattcagatatttgggttaaacgatgacagttttctggtttaatcaaggcacttgcaaagagctatctttgacatgacatgaagtccctacgtgttgttagccattaatgatggcatggtttttctataccaagcattctataacaagaacccaagcctgacagtttgatcacaaagtcacttataacccgcgtacctgcccgggcggccgcccgggcaggtacgcgggggccagccaagatggttgcccccgcagtgaaggttgcccgaggatggtcgggcctggcgttgggcgtgcggcgggctgtcttgcagctt

SEQ ID NO: 223 - DNA, 134 bp, Homo sapiens
actatagggcgaattggagctcaccgcggtggcggccgggcccgtggaggcctaggctggccctaggaccttcttggtttgctccttggattccccttcccactccagcaccccagccagcctggtacctcggc

SEQ ID NO: 224 - DNA, 252 bp, Homo sapiens
  misc_feature 7, 40, 81, 83, 101, 128, 139, 140, 156, 163, 167, 169, 200,208, 209, 211, 218: n = A,T,C or G
tagggcnaattggagctccccgcggtggcggccgcccggncaggtaccaaaaaacatattggtttggcaatgcatctccanancaggtgatcctggccgtntgtcctggggacactgacaccgagggnggctgtatcanntcataagaggcctcanagcctgngcananagtgaggatggggagaagtacagggatccangccatggnnanacacccngagttctgcctcctggacccacccccgcgtacct

SEQ ID NO: 225 - DNA, 44 bp, Homo sapiens
  misc_feature 17: n = A,T,C or G
acctcgagggggggccnggtcccagcttttgttccctttaatga

SEQ ID NO: 226 - DNA, 235 bp, Homo sapiens
  misc_feature 1: n = A,T,C or G
naattggagctccccgcggtggcggcccgcccgggcaggtacgcggggacaccaaacaactcattacacaaagaggtaaggtcccagaccacgccaaagcttcctgagacctctcctcatctgtgcatggacggatgaccaactctggggcccaggctgttgcttcccagtataatgatgaatccgccatagtctggtgagtgtagaggctgactctggagcccaggctgtacct

SEQ ID NO: 227 - DNA, 319 bp, Homo sapiens
  misc_feature 264, 274: n = A,T,C or G
ggagctccccgcggtggcggcccgcccgggcaggtacttggattacaggcgtggaccagcatgccatgcctatagtgatatctttaagtaaccctctcttttcttcttttgagcaatttttcaaagcaacaggcattttattaaataagaaagtcgatgtgctttcctaatgcctgttaataaagtaaggagccaaggaacctctgtgatttcaatgaaatccctccagatattataggctacttgttactgacaagtatggcnggaactgcangtcaagctgtgataggcaaatagatcttgctgaagaggaagaatg

SEQ ID NO: 228 - DNA, 179 bp, Homo sapiens
gggcgaattggagctccccgcggtggcggccgcccgggcaggtacgcggggccaggcggaagcccggctccgggccagcatccgagagcccggactggagagtcaacttttataacactgttactgggaatacttgacttactaagcttttactgaacactttaattttgggagtacct

SEQ ID NO: 229 - DNA, 602 bp, Homo sapiens
  misc_feature 16, 245, 253, 283, 315, 345, 382, 403, 404, 408, 422, 423,431, 439, 448, 455, 483, 511, 533, 544, 549, 555, 565, 574,580, 587: n = A,T,C or G
aggtaccgctttgtangggaaggaggagtaaggatgtcggagacctgtgtccaggtgcaccgatgccagacagacgctcccatgtggctgaatgggacccaccctgcccttggggatggcatcaccaaccacactgcctgtgcccattggagtggcaactgctgtttctggaaaacagaggtgctggtgaaggcctgcccaggcgggtacctgcccgggcggccgcccggcaggtactgtttctnaacctganctgcatattggaatcacctggggagctttnacaactacatgattcctaggacccatctccanaaagtccaaaataattgctctgggtgcaanctggactgtgggatttttaatcccttccctccctganattctaatgtgcaaccagtgnnaagnaacatcatcctgtnnaccgtttnccaaacangtgtggatntgggcanacaggcttgtcaaaatgccttttcccanatccatcccaagacaacaaattcattanttttggggcaacttccaaaatnttacttttttntcaantccaanccccattttnatttttatngaaganggcgttntaacaaatttaaaaa

SEQ ID NO: 230 - DNA, 202 bp, Homo sapiens
  misc_feature 144, 145, 152, 154, 155, 156, 164, 167: n = A,T,C or G
ccgggcaggtactttgagcaaggtccgcaagcaggatgcctgcacttctccagtcatgctccagcaccaggtcggaagctgtctacatgcggggatggaccctggcatcctgggctcacaaggatagggccctgaatatgggcnnagccgancnnncttgaganggnagctgcacccaccctgagtgcctcccgtggtacct

SEQ ID NO: 231 - DNA, 194 bp, Homo sapiens
  misc_feature 13, 25, 36, 40, 41, 68, 70, 98, 103, 104, 106, 115, 136: n = A,T,C or G
ccgggcaggtacncgggggctgtangctcaagaggnacanntctgaatgtctcaccatggcctggatncntctcctgctccccctcctaattctatgnacagnntntgtggcctnctatgagctgacacagccatnctcagtgtcagtgtctccggtagagacagccaggatcacctgctcaggaaatgtacct

SEQ ID NO: 232 - DNA, 271 bp, Homo sapiens
  misc_feature 5, 34, 89, 147, 148, 160, 164, 167, 187, 192, 214, 220, 221,223, 224, 234, 235, 240, 241, 242, 246, 247, 260, 264: n = A,T,C or G
gattntgaaaatattcatcaccatgatgtctganagtgttcggatgatgctgaacaaatgggaggaacacattgcccaaaactcacgtntggagctctttcaacatgtctccctgatgaccctggacagcatcatgaatgtgccttnnccaccagggcancatncanttggacagtaccttggccgntctanaactatggatcccccggctgangaattnnanntcaacttatnnatccnnnactnnaggggggcccggncccnacttttg

SEQ ID NO: 233 - DNA, 239 bp, Homo sapiens
ttggagctccccgcggtggcggccggccatggaggctgatggggccggcgagcagatgagaccgctactcacccggggtcctgatgaagaagctgttgtggatcttggcaaaactagctcaactgtgaacaccaagtttgaaaaagaagaactagaaagtcatagagctgtatatattggtgttcacgtcccgtttagtaaagagagtcgccggcgtcataggcatcgcggacacaaac

SEQ ID NO: 234 - DNA, 582 bp, Homo sapiens
  misc_feature 206, 340, 408, 419, 425, 427, 452, 459, 464, 466, 474, 476,480, 512, 517, 530, 537, 542, 548, 554, 555, 558, 560, 562,563, 566, 567, 568, 569: n = A,T,C or G
gattggagctccccgcggtggcggccgaggtacgcggggatggctggccagaggaggaacgctttgtgttctcatcggagctgcatgggaagtctgcatacagcaaagtgacctgcatgcctcaccttatggaaaggatggtgggctctggcctcctgtggctggccttggtctcctgcattctgacccaggcatctgcagtgcancgaggttatggaaaccccattgaagccagttcgtatgggctggacctgaactgcggagctcctggcaccccagaggctcatgtctgttttgacccctgtcagaattacaccctcctggatgaacccttccgaancacagagaactcagcagggtcccaggggtacgataaaaacatgagcggctggtacctgcccgggcggncgcccgggcangtactnangtgtaaagggatttatatggggacnttggccnatttncnggtgttgncngttnctctttttaagcttatactcatgaatcttgtnttaancttttgaaggcanactgccnaaatnctgganaaatannagntngnnaannnngggggtttttttt

SEQ ID NO: 235 - DNA, 158 bp, Homo sapiens
  misc_feature 134: n = A,T,C or G
ggtggcggccgcccgggcaggtacctcagaagcaaacccagttcctgcacacagaaaccccattcaggctcctactgcactgagaagcacgtgttctccatttccctgggggagaccattgtattgggcagttnggaacaaaacaccatggactggga

SEQ ID NO: 236 - DNA, 147 bp, Homo sapiens
ttagggcgaattggagctccccgcggtggcggccgcacaaaaaccaatctacctgatgaaaactccgttcccttctcgccagaaacataaaatgcgatggagctacggccaccgctgccgagacaaaatggcgccccccgcgtacct

SEQ ID NO: 237 - DNA, 763 bp, Homo sapiens
  misc_feature 25, 27, 28, 29, 36, 78, 99, 145, 177, 204, 205, 231, 233,235, 236, 253, 259, 262, 289, 299, 346, 352, 369, 370, 371,385, 448, 514, 539, 544, 546, 551, 554, 555, 556, 558, 578,696, 719, 750, 753: n = A,T,C or G
tggagctccccgcggtggcggccgncnnnccgggtnctcaccaaaattgggcctgagaaatttgttatatcctgctgngaggttctcaaagccaggcanggaaagcttgtcacttctgccgacctcgacgttgaactgactcctntggatgcacatcctctcagtgaagagactcanacacacgaaggccaagtggaggctgcnnttcatgttgagaagctgctcacaccnangnnctgaagtaagaatcacnatgtanttnttgaggctctgttagggcaagtccttnaggcctacangcaagacttccaggcaaggcacggtcttctgggtccccagggttctnctcatnctcagccctgtcccctnnnatgtggacacgcanccaccctcagatggagtggctctctgggaaagaatggagctgctaaacctgtcttggctccanccatgcaggtaaggggagggattgcttggacgcttggccttgcaccctgagggagctgggagccangagggactcatatggaagggcaganaaaanancttantgnnngntacctgccccgggccggccntgaaccatttactgtcggtgtatttaaactgcacttggtagacaacaagcctcgtgctattgctcaaggccactgcttccaactcaggacctgctctgctttgacctcggccctctanaactatggatcccccggctgcangaattcattcaacttatcgattccgtcgacntcnagggggggcc

SEQ ID NO: 238 - DNA, 723 bp, Homo sapiens
  misc_feature 347, 349, 385, 504, 552, 569, 578, 585, 648, 678, 694, 697,705, 707: n = A,T,C or G
tcactataggggcgaattgggagctccaccgcggtgggcggcccgaggtacagcacccgcttggctgtgctgagcagcagcctgacccattggaagaagctgccaccgctgccgtctcttaccagccagccccaccaagtgctggccagtgagcccatcccgttctctgatttgcagcaggtctccaggatagctgcttatgcctacagtgcactttctcagatccgtgtggacgcaaaagaggagctggttgtcgaccagacactatttcagctaaaaccccagctcgaagaccaaagaagtgggttggcttgtctctgacaagtcacgcttttgattcttttacngnctttgtgggacacaaagatgggtggagatggctcanaagttgggagctgctctccaggttggggaggcactggtctggaccaaaccagttaaagatcccaaatcaaaacaccagaccactttaaccaagcaaacctgccagtttccagcaacctntgggctctaatcaaagcttctaggacaggcaatgtctttagcagctgnatacaaggacgcttccnttaagtagnaaccatncaagagcttccatgaaagaccttggcaaggtaccctgcccgggccgggcggttctaaaaactngtggattcccccggggccggaaggaattcnatttaaaagcttattnganacccgccnanccttgaaggggggggg

SEQ ID NO: 239 - DNA, 305 bp, Homo sapiens
  misc_feature 109: n = A,T,C or G
cgcggtggcggccgaggtacaggaggcccgacaatttggtgaccaagtgatggcaggccactcagctttgagtagccatgtccgccacaggccctgcggcacatctcanctccctgggtgcagaattctgacatcatggccttcatgcccgtgctcagtgcgtggagctgtgagaacatggaggggggttgggcggtgttagggggcctccaccataggggaccaaccctgtgcaccacttactgagcatctactcatgcccagctcaactctgaggtcccgcgtcctgccgggcggccgctcta

SEQ ID NO: 240 - DNA, 565 bp, Homo sapiens
ccgggcaggtacccagggaacaaatgctactgggactccacacctacctaagaagcagctctacccagactccacatggctctctgttttggtctggagaccccagctggggtatctcctgagcccagggattcaaaggttcgtggcagaaatatgcatcccacgggactctcactcactcaccattttcttgtagggggattcccctgggtctgtgccactcctgggtgaatggttgatctgtctcactcttctccgtgatccgaaggtcacactatgtcactgatgaatccttatgtgtccacctggatgttccggttgaagagctagtgtctcaccactctttctgctatttgtgagagtggcacacactagctgcttctagtcaaccatcttggccccacctcactcacttttctcaagtaatcaaagaccagaaaggatgtcctttacaagagcagatcccccaaaatgtaagagttcactgaaaaggtgggagctcaaaccaagagaggacctatctcgcagcataaagacaacttgtacctcggccgctctagaacta

SEQ ID NO: 241 - DNA, 236 bp, Homo sapiens
  misc_feature 171: n = A,T,C or G
aggtacagtgtctccgtcccgcggaaaaagaagcctctgaacccgcgccggcccgcagcccccgtgccttccggccgcccgggcaggtacgcgggggccgcggagacaaagatggctgcgagagtcggcgccttctcaagaatgcctgggacaaggagccagtgctggtcngtgtccttcgtcgtcgggggcctcgctgtaattctacccccattgagcccctacttcaagtacct

SEQ ID NO: 242 - DNA, 153 bp, Homo sapiens
  misc_feature 21, 26, 55, 57, 60, 68, 71, 85, 146: n = A,T,C or G
agtgaactaactcacattaanttgcnttggcgcctcactggccgcttttcaagtncnggnaaacctgntcntgccaggctggcanttaattgaaatcgggccaaacgcccccggggagaaggcggttttgcgtatttgggcggctntttccgc

SEQ ID NO: 243 - DNA, 411 bp, Homo sapiens
accgcggtggcggcccgaggtacatgacgggatttcactatgttggccaggctggtctcaaattcctgacctcgtgacccacgtgccttggcctgccaacatgctgggattgcaggtgtgagccaccgcgcccggccccaacttctcctaatgttgctattttgatcttattttttaaatcatgaatgttctcaatgacatctagaatggtgaatcctttccagtaggttttcaattattttgcccagatccatcaaaggaatcactttctagagaagttatagctttatgaaatatatttttaagtgataaagacttgaaagttgcaattattctttgatccaagggcaccaagaatgaatgttgggttagtaggcatgaaaacaatattcagctctttgtacctgcccg

SEQ ID NO: 244 - DNA, 535 bp, Homo sapiens
  misc_feature 510: n = A,T,C or G
ggagctccaccgcggtgggcggccgaggtacaagcagtaattgattcactggccttgggctacttgcaggtcagcttgtctcacataacaggttggtatatgtataactatcacataattatgcattttagtaaaaataattgtttagaactggcttcgggcagttgtgacctctaactgtaatttccttgcttcttctgtatgtttccacctcttgtgctgtgcgcctagccaaatcagggtgctcttgataaaaattcttctcaaatttaggcagctcatcaagattccacttctttttaactaatttctccccagggtttccaaacttctttcagataagggccctgccctacttcctccaaatcgaggtgcaccaaaccctcggtcccggccgtgcttctgctatggcgaaggagccctcggccttcaaccactgtgcccacgcctaccggttttctggggatgttgccaccacctctgaagagtgaaaccaagcttttcatgcangaagagccaggtgctggggggcttc

SEQ ID NO: 245 - DNA, 211 bp, Homo sapiens
tctgaatgatcgcgttgctcgagctgccgttggaagcttagaagcaggtgctaccgtgctagatacaaagcgatctatttaaaagccctctgtcacgcacgcacacttactgacgaatcttctggctctctcctaccccgcccggtggcggattccggaattggttcaaaaggccttgatcccgaacacccaggacagagacagagtacct

SEQ ID NO: 246 - DNA, 463 bp, Homo sapiens
  misc_feature 262, 378, 445: n = A,T,C or G
cgaggtacaagcagtaattgattcactggccttggactacttgcaggtcaagcttgtctcacataacaggttggtatatgtataactatcacataattatgcattttagtaaaaataattgtttagaactggcttcgggcagttgtgacctctaactgtaatttccttgcttcttctgtatgtttccacctcttgtgctgtgcgcctagccaaatcagggtgctcttgataaaaattcttctcaaatttaggcagctcatcnagattccacttctttttaactaatttctccccagggtttccaaacttctttccagataagggccctgccctacttcctccaaatcgaggtgcaccaaaccctcggtccccggccgntctaagaactaattggatcccccgggctggcaggaattcgatatccaagcttaatcgatcccgtcgnacctcgaggggggggccc

SEQ ID NO: 247 - DNA, 229 bp, Homo sapiens
  misc_feature 145: n = A,T,C or G
cgaggtactctgcgttgttaccacaggcgatgacagctccatgtgtgttattgcccctgaagaccttccagagacaaaatgtggaggtggaagacagtgatactgatgaccctgaccctgtgtggatctaggctaacatgtgttnttgtgtcttagttttcaacaaaaaagtttaaaaagttaaaatactaagtttataaagttaaaaagttaccccgcgtcctgcccg

SEQ ID NO: 248 - DNA, 98 bp, Homo sapiens
  misc_feature 8, 24, 28, 68, 69: n = A,T,C or G
atcatggncatagcttgtttctgntgtnaaattgttatccgcttcacaaattcccacacaaacatacnnagcccgggaagcataaaagtgtaaaggcc

SEQ ID NO: 249 - DNA, 138 bp, Homo sapiens
gggcgaattggagctcaccgcggtggcggcccgaggtacgcggggatgctgcgcctctccgaacgcaacatgaaggtgctccttgccgccgccctcatcgcggggtccgtcttcttcctgctgctgccgggaccttct

SEQ ID NO: 250 - DNA, 472 bp, Homo sapiens
  misc_feature 1, 458: n = A,T,C or G
nattggagctccccgcggtggcggccgaggtacaagttgtctttatgctgcgagataagtcctctcttggtttgagctcccaccttttcagtgaactcttacattttgggggatctgctcttgtaaaggacatcctttctggtctttgattacttgagaaaagtgagtgaggtggggccaagatggttgactagaagcagctagtgtgtgccactctcacaaatagcagaaagagtggtgagacactagctcttcaaccggaacatccaggtggacacataaggattcatcagtgacatagtgtgaccttcggatcacggagaagagtgagacagatcagccattcacccaggagtggcacagacccaggggaatccccctacaagaaaatggtgagtgagtgagagtcccgtggggatgcatatttctgccacgaacctttgaatccctgggctcangagataccccagct

SEQ ID NO: 251 - DNA, 399 bp, Homo sapiens
  misc_feature 155: n = A,T,C or G
attggagctccccgcggtggcggccgccgggcaggtacaagcagtaattgattcactggccttggactacttgcaggtcagcttgtctcacataacaggttggtatatgtataactatcacataattatgcattttagtaaaaataattgtttanaactggcttcgggcagttgtgacctctaactgtaatttccttgcttcttctgtatgtttccacctcttgtgctgtgcgcctagccaaatcagggtgctcttgataaaaattcttctcaaatttaggcagctcatcaagattccacttctttttaactaatttctccccagggtttccaaacttctttccagataagggccctgccctacttcctccaaatcgaggtgcaccaaaccctcggtcc

SEQ ID NO: 252 - DNA, 467 bp, Homo sapiens
  misc_feature 219, 408, 449: n = A,T,C or G
aattggagctccccgcggtggcggccgcccgggcaggtaccacatgcctgtaatcccagctacttggaagctgaggcaggagaatctcttgaacttggaaggcggaggttgcagtgaaccaaaatcacgccacagcactccagcctgggagacagagcaaggcttagttttaaaaaaaaaatcaaatattgtgtgattctgtttataggaaatattcanaattggtaagtccataaggacaaaaaccagattgacaggggctgagatgaaaaagagaatggggtatggggagtgacagcttgataggtatgggttttgttggggggagataatgaaaacatttggaactaggagaatcacctgacatcaggagttcaagaccactgaactcgaacctgggtgacagantgagactccgtctcaaaaaaaaaaaaaatgtttggaactanatggtggtggttgtacct

SEQ ID NO: 253 - DNA, 266 bp, Homo sapiens
  misc_feature 154: n = A,T,C or G
ttggagctccccgcggtggcggccgcccgggcaggtactgtgggtgggacaaaatattttttcagatttttagacttggaatatgattcctgctgtctagcagaataagaagaagataatggcaggaggacagcacggactaaactccaagcanaaaaaaacaaaaagatcaaatttaagacctttttggtgagcccgttttaatcctggtcctactctgtcccaaatttctacatcaagactgcctgtctgtggaaaccacgggt

SEQ ID NO: 254 - DNA, 460 bp, Homo sapiens
  misc_feature 4: n = A,T,C or G
ggcngattggagctccccgcggtggcggccgaggtacaagttgtctttatgctgcgagataagtcctctcttggtttgagctcccaccttttcagtgaactcttacattttgggggatctgctcttgtaaaggacatcctttctggtctttgattacttgagaaaagtgagtgaggtggggccaagatggttgactagaagcagctagtgtgtgccactctcacaaatagcagaaagagtggtgagacactagctcttcaaccggaacatccaggtggacacataaggattcatcagtgacatagtgtgaccttcggatcacggagaagagtgagacagatcagccattcacccaggagtggcacagacccaggggaatccccctacaagaaaatggtgagtgagtgagagtcccgtgggatgcatatttctgccacgaacctttgaatccctgggctca

SEQ ID NO: 255 - DNA, 452 bp, Homo sapiens
  misc_feature 427: n = A,T,C or G
aattggagctccccgcggtggcggcccgaggtacatcatttccagagcaggcactggcagcgagatagggttggaggagaagtagcgccgggacttccggatggcaaacttctctgtgggtagagatttcccagcaatcttgagcttcaggcctggacagctcgaaataattccacttcgtcgtccccgaacggcttgtggtcctccttcccaaacatgctgaggtaggcggccttcatgtaaatgtaggtggcctttttaagtcagatcatgtcagttccttctggaaatctggttatattccatcacactcaggagacatctcctacaatttccttgacacctgcagcactccagccacacgacggcctcagggcggttcccaggacacatcaaacacactcctgccctgctgtgccctgcccanctccctctccccgcgtacctgcccg

SEQ ID NO: 256 - DNA, 429 bp, Homo sapiens
tagggcgaattggagctccccgcggtggcggccgcccgggcaggtacccagggaacaaatgctactgggactccacacctacctaagaagcagctctacccagactccacatggctctctgttttggtctggagaccccagctggggtatctcctgagcccagggattcaaaggttcgtggcagaaatatgcatcccacgggactctcactcactcaccattttcttgtagggggattcccctgggtctgtgccactcctgggtgaatggttgatctgtctcactcttctccgtgatccgaaggtcacactatgtcactgatgaatccttatgtgtccacctggatgttccggttgaagagctagtgtctcaccactcttcctgctatttgtgagagtggcacacactagctgcttctagtcaaccatc

SEQ ID NO: 257 - DNA, 477 bp, Homo sapiens
  misc_feature 5, 248: n = A,T,C or G
gggcnaattggagctccccgcggtggcggccgaggtactgtccaactggatgctgccctggtggctgaaggcacacttcatgatgctgtccagggtcatcagggagacatgttgaaagagctccagacgtgagttttgggcaatgtgttcctcccatttgttcagcatcatccgaacactcttagacatcatggtgatgaatattttcagaatgctgatgttgaagccaggtttcacaatctggcggngctttttccatttagaaccatccagggtcacaagtcctcgaccaacccaggattcaaggattttgtggctaacagcacttttgggatcttgtcttttcaggagaatcttgacatagtctgggtcatggatattgaagaacatcgtaaagggtccaacccacaagggaacggcacatgggtatttttccatcagctcaggatcacctcaaactcttttactgggtaagac

SEQ ID NO: 258 - DNA, 400 bp, Homo sapiens
gcgaattggagctccacccgcggtggcggcccgaggtacaagcagtaattgattcactggccttggactacttgcaggtcagcttgtctcacataacaggttggtatatgtataactatcacataattatgcattttagtaaaaataattgtttagaactggcttcgggcagttgtgacctctaactgtaatttccttgcttcttctgtatgtttccacctcttgtgctgtgcgcctagccaaatcagggtgctcttgataaaaattcttctcaaatttaggcagctcatcaagattccacttctttttaactaatttctccccagggtttccaaacttctttccagataagggccctgccctacttcctccaaatcgaggtgcaccaaaccctcggtcc

SEQ ID NO: 259 - DNA, 249 bp, Homo sapiens
aggtacaggacattcctctgctcctattgcccctgtttccgttcttttcacactgtctgtgggtgctgtgccctgttggaactctctttaacgtcttacgttggagccgctaaccttccccaggtgtttgcttcattgctttcacagggaaagaattactcgtcccactgacgagttctatgtatgtccctgggaagctgcatgatgtggaacacgtgctcatcgatgtgggaactgggtacctgcccg

SEQ ID NO: 260 - DNA, 231 bp, Homo sapiens
  misc_feature 8, 11, 13, 16, 17, 21, 38: n = A,T,C or G
gcgaggtnctntncgnngttnccacacgcgatgacagntccatgtgtgttattgcccctgaagaccttccagagacaaaatgtggaggtggaagacagtgatactgatgaccctgaccctgtgtggatctaggctaacatgtgtttttgtgtcttagttttcaacaaaaaagtttaaaaagttaaaatactaagtttataaagttaaaaagttaccccgcgtacctgcccg

SEQ ID NO: 261 - DNA, 452 bp, Homo sapiens
ccgggcaggtactgtccaactggatgctgccctggtggctgaaggcacacttcatgatgctgtccagggtcatcagggagacatgttgaaagagctccagacgtgagttttgggcaatgtgttcctcccatttgttcagcatcatccgaacactctcagacatcatggtgatgaatattttcagaatgctgatgttgaagccaggtttcacaatctggcggtgctttttccatttagaaccatccagggtcacaagtcctcgaccaacccaggattcaaggattttgtggctaacagcacttttgggatcttgtcttttcaggagaatcttggcatagtctgggtcatggacactgaagaacatcgtaaagggtccaacccacaagggaacagcacatgggtatttttccatcagcttatgatacccctcaaactcctttactgggtaaaac

SEQ ID NO: 262 - DNA, 511 bp, Homo sapiens
  misc_feature 1, 27, 436, 485: n = A,T,C or G
naattggagctccccgcggtggcggcncgaggtacctgtggcagcccttcttcagacacggctacttctgcttccacgaggctgctgaccagaagaggtttagtgccctcctgagtgactgcgtcaggcatctcaatcatgattacatgaagcagatgacatttgaagcccaggcctttttagaagctgtgcaattcttccgacaggagaagggtcactatggttcctgggaaatgatcactggggatgaaatccagatcctgagtaacctggtgatggaggagctcctgtccactcttcagacagacctgctgcctaagatgaaggggaagaagaatggcagaaagaggacgtggctcggtctcctcgaggaggcctacaccctggttcagcatcaagtttcagaaggattaagtgccttgaaggaggaatgcanagctctgacaaagggcctggaaggaacgatccgttctgacatggatcanattgtgaactcaaagaactatttaat

SEQ ID NO: 263 - DNA, 259 bp, Homo sapiens
  misc_feature 3: n = A,T,C or G
gcnaattggagctccccgcggtggcggcccgaggtactctgcgttgttaccacaggcgatgacagctccatgtgtgttattgcccctgaagaccttccagagacaaaatgtggaggtggaagacagtgatactgatgaccctgaccctgtgtggatctaggctaacatgtgtttttgtgtcttagttttcaacaaaaaagtttaaaaagttaaaatactaagtttataaagttaaaaagttaccccgcgtacctgcccg

SEQ ID NO: 264 - DNA, 508 bp, Homo sapiens
attggagctccccgcggtggcggccgaggtacacttcccggggaaccacccactgggctgcaatctcccagggagactgcaaggtatggtccagcttgggtgccagctccacccgcaagccagtcatcattcggtgaaaggccctctggtcctcccggttggcagctgatgtatctaagttgtcaatcaggaaaactttggtgaagataaaaatgacaaggagaattgctaacagcacgactcgctgctttagcttcatgttgacctcttttccttctcctctgacccactcttgctcatgtattaaggagagctggtggtgatggttagcaaggagattccatgattatacacattggtccatttcttcactgatgcaccttccacagttccttcctccatacgcaaacacagactggcaattcacaagtaaatgcaaggttttcaatatccaacagtttgtagtcatgaaaaaaaagtcaaaagtaaaacactccgtacctgcccg

SEQ ID NO: 265 - DNA, 250 bp, Homo sapiens
ctccccgcggtggcggcccgcccgggcaggtacgcggggtaactttttaactttataaacttagtattttaactttttaaacttttttgttgaaaactaagacacaaaaacacatgttagcctagatccacacagggtcagggtcatcagtatcactgtcttccacctccacattttgtctctggaaggtcttcaggggcaataacacacatggagctgtcatcgcctgtggtaacaacgcagagtacct

SEQ ID NO: 266 - DNA, 407 bp, Homo sapiens
tagggcgaattggagctccccgcggtggcggccgggacccgagggtttggtgcacctcgatttggaggaagtagggcagggcccttatctggaaagaagtttggaaaccctggggagaaattagttaaaaagaagtggaatcttgatgagctgcctaaatttgagaagaatttttatcaagagcaccctgatttggctaggcgcacagcacaagaggtggaaacatacagaagaagcaaggaaattacagttagaggtcacaactgcccgaagccagttctaaacaattatttttactaaaatgcataattatgtgatagttatacatataccaacctgttatgtgagacaagctgacctgcaagtagtccaaggccagtgaatcaattactgcttgtacctgcccg

SEQ ID NO: 267 - DNA, 641 bp, Homo sapiens
  misc_feature 426, 521, 548, 557, 560, 592, 596, 598, 603, 604, 618, 619,620, 629: n = A,T,C or G
ccgcggtggcggcccgaggtataatgccaggaagatgaatgtgcgttaatgttgctggaacatggcactgatccaaacattccagatgagtatggaaataccactctacactacgctatctacaatgaagataaattaatggccaaagcactgctcttatacggtgctgatatcgaatcaaaaaacaagcatggcctcacaccactgctacttggtgtacctgcccgggcggccgcccgggcaggtacgcgggacccaaaaaccacacccctccttgggagaatcccctagatcacagctcctcaccatggactggacctggagcatccttttcttggtggcagcagcaacaggtgcccactcccaggttcagctggtgcagtctggagctgaggtgaagaaacctggggcctcagtgaaggtctnctgcaaggcttctggttacacctttaccagcaatgggtatcagctgggtgcgacaggcccctggacaagggcttgagtggatgggatgggatcancgcttacaatgggtaacacaaactacncacaagaanctncagggcagagtcaccatgaccacagacacatncacnancacannctacatgggagctnnnggagcctgnaatcttacgacc

SEQ ID NO: 268 - DNA, 328 bp, Homo sapiens
  misc_feature 155, 261, 272, 273, 279, 288, 291, 297, 301, 303, 309, 314,316, 319: n = A,T,C or G
ccgggcaggtacaatgccttgaacatcgtcctgcttcccagtgggttcagacctcacctctcagggagcgacctgggcaaagacagagaagctcccagaaggagagattgatccatgtctgtttgtaggacggagaaaccgcttgggtaacttgntcaagatatgatcgcatgttgctttctaagaaagccctgtattttgtgattgtcttttttttttttaagatgctttcattttgccaaaataaaacagataatgttnaaaaaaaaaannaaaaantcaaaaatnaangtgccngggncnctctanaactngnggntcccccggg

SEQ ID NO: 269 - DNA, 257 bp, Homo sapiens
aattggagctccccgcggtggcggccgcccgggcaggtacgcggggtaactttttaactttataaacttagtattttaactttttaaacttttttgttgaaaactaagacacaaaaacacatgttagcctagatccacacagggtcagggtcatcagtatcactgtcttccacctccacattttgtctctggaaggtcctcaggggcaataacacacatggagctgtcatcgcctgtggtaacaacgcagagtacct

SEQ ID NO: 270 - DNA, 368 bp, Homo sapiens
  misc_feature 288: n = A,T,C or G
aggtacaagcagtaattgattcactggccttggactacttgcaggtcagcttgtctcacataacaggttggtatatgtataactatcacataattatgcattttagtaaaaataattgtttagaactggcttcgggcagttgtgacctctaactgtaatttccttgcttcttctgtatgtttccacctcttgtgctgtgcgcctagccaaatcagggtgctcttgataaaaattcttctcaaatttaggcagctcatcaagattccacttctttttaactaatttctncccagggtttccaaacttctttccagataagggccctgccctacttcctccaaatcgagggtgcaccaaaccctcggtcc

SEQ ID NO: 271 - DNA, 523 bp, Homo sapiens
  misc_feature 322, 337, 424, 493, 509: n = A,T,C or G
ccgggcaggtacgcgggtcatggatcgaagactcatgcaagatgataatcgtggccttgagcaaggtatccaggataacaagattacagctaatctatttcgaatactattagaaaaaagaagtgctgttaatacggaagaagaaaagaagtcggtcagttatccttctctccttagccacataacttcttctctcatgaatcatccagtcattccaatggcaaataagttctcctcgcctacccttgagctgcaaggtgaattctctccattacagtcatcttttgccttgtgacattcatctggttaatttgagaacaanacaagtcaaaaggtnggcaatggggcacttccaaatgaaggcagccttggatcctccacaagaaaagggttttgatttgtcggtttcttctaagcaaagggnacaaggggttggtttttggttctactacctcagggggaaaaggaatatttggtaccctttgggcccgcntcttagaaacttagtnggaatccccccccg

SEQ ID NO: 272 - DNA, 475 bp, Homo sapiens
ccgcggtggcggcccgaggtaccaaaaagactctcaaaaaccaatactcccacgggcaagggaatagccaagtttgttgcggtttccaatgaatgacatcagccctgtgtaggtctcaatcaaaatgggttcagttaacaccatcagtttctttcctcttccagatccagttgaattcttgtgggcattctggatagctggaacaagcttagacatgaacccagacaacttgcaaatttcaaggaatttctcactggtgtatttcataggatgctcagtgaaagtagcataaggaacttcagtggaccatgggttccggcgggacagaagagactgctcctccggactcccccagtagatcctaaggccttctccttgtctcttgtccagggacatcccagggaaggtgaacttgcccaggcagatgcgatagacagcgctcagaggaatccgctgcagctgcacacaactcagc

SEQ ID NO: 273 - DNA, 478 bp, Homo sapiens
  misc_feature 338, 414, 433, 465: n = A,T,C or G
aggtactttctctttgtctctgccttccaggcaacagggattttggggtagtagttagctctacaaattatcttgagcagttaaaagcctttgcaagctcaaaatttactgctctgggctccttctgggaaaagcagtggaaactgcccaatgctgtagcttagcagttaaggctttgtcttttcacaatggtggcctgagttcaggttcaatttttagcctaggaaaatgagcactttctggttggcatttgggtgacctgtgccattttgttggattcttcctcccctttcataaactgtcttaaattttccttttcttctgagcacctgggaggntacattttggaaaagttaaaaagccagggaacccgcgtacctgcccgggcgggccgctctaagaactagtgggatncccccgggctggcaggaanttcgatatcaaagcttatcgatacccggcganctcgagggggggg

SEQ ID NO: 274 - DNA, 481 bp, Homo sapiens
  misc_feature 204, 266, 320, 328, 402, 424, 462, 470: n = A,T,C or G
accgcggtggcggccgcccgggcaggtacgcgttttacaaagagcagcttgttaaggccaaagaacagtattgaaaattacaagaaaacagaccagtaaatggtctggggaaggatcatgaaatcctgaggaggaggattgaaaatggagctaaagagctctggtttttcctacagagtgaattgaagaaattaaagaacttanaaggaaatgaactccaaagacatgcaagatgaatttcttttgggattttaggacatcatganaaggtctattaatggaccggatctatacttacctcagttcatgacaggattggnaagccagngttgaatttgggccggggaaaaaaaggaggcccaaaaagtatccttgaacaaggaaacttgggttccaggccgngaggaaattaaccattaattcntttcaagaaaatccccaaagggggaccttggcaatcanaaaggccnaaaaaaaagcc

SEQ ID NO: 275 - DNA, 642 bp, Homo sapiens
  misc_feature 494, 584, 594, 599, 605, 617, 619, 628: n = A,T,C or G
ccgggcaggtacccagggaacaaatgctactggggctccacacctacctaagaagcagctctacccagactccacatggctctctgttttggtctggagaccccaactggggtatctcctgagcccagggattcaaaggttcgtggcagaaatatgcatcccacgggactctcactcactcaccattttcttgtagggggattcccctgggtctgtgccactcctgggtgaatggttgatctgtctcactcttctccgtgatccgaaggtcacactatgtcactgatgaatccttatgtgtccacctggatgttccggttgaagagctagtgtctcaccactctttctgctatttgtgagagtggcacacactagctgcttctagtcaaccatcttggccccacctcactcacttttctcaagtaatcaaagaccagaaaggatgtcctttacaagaacagatcccccaaaatgtaagagttcactgaaaaggngggagctcaaaccaagagaggacttatctcgcaacataaagacaacttgtaccttgggccggtctagaactaaggggatccccgggctgnaaggaattcnatatnaaagcntattggatcccncngacctcgangggggggcccggga

SEQ ID NO: 276 - DNA, 478 bp, Homo sapiens
cgggggccattgagactgccatggaagacttgaaaggtcacgtagctgagacttctggagagaccattcaaggcttctggctcttgacaaagatagaccactggaacaatgagaaggagagaattctactggtcacagacaagactctcttgatctgcaaatacgacttcatcatgctgagttgtgtgcagctgcagcggattcctctgagcgctgtctatcgcatctgcctgggcaagttcaccttccctgggatgtccctggacaagagacaaggagaaggccttaggatctactgggggagtccggaggagcagtctcttctgtcccgctggaacccatggtccactgaagttccttatgctactttcactgagcatcctatgaaatacaccagtgagaaattccttgaaatttgcaagttgtctgggttcatgtctaagcttggtccaactattccagaatgcccacaagaatt

SEQ ID NO: 277 - DNA, 251 bp, Homo sapiens
ccgcggtggcggcccgaggtactgagcgcgcgaggctctacagagtgaaggtttaaatccaaggtcatggcaaaacatctgaagttcatcgccaggactgtgatggtacgcgggggactcggggtcgcctttggagcagagaggaggcaatggccaccatggagaacaaggtgatctgcgccctggtcctggtgtccatgctggccctcggcaccctggccgaggcccagacagagacgtgtacctgcccg

SEQ ID NO: 278 - DNA, 477 bp, Homo sapiens
  misc_feature 222: n = A,T,C or G
ccgcggtggcggcccgaggtacgcgggcctgctgctgctgcagccccagctaaggttgaagccaaggaagagtcggaggagtcggacgaggatatgggatttggtctctttgactaatcaccaaaaagcaaccaacttagccagttttatttgcaaaacaaggaaataaaggcttacttctttaaaaaaaaaaaaaaaaaaaaaaaaaaaaaaaaaaaggtncatggtcatttgaaaggcaaaatctttatttacttacttattattttattttttgtagagatgaggcctcactatattgttcaggctgatcttgaactcttgggctcaagtgatcctcctgcctcaacctcccaagtgctggggtcataggcatgagccactgtgcctggcccagaatcctttttaaaatgatgatgaaatgccagagtcttagatactcagcactcactatccaggccattttgccgggtagat

SEQ ID NO: 279 - DNA, 498 bp, Homo sapiens
  misc_feature 12: n = A,T,C or G
cgaggtactttnttttttttttttttcttttttttgagacgggatctagccctgcagcctctgcctcccaggctcaagctattctcgtgtcttggcctcccgagtagctgggattactggtgcatgccacatgcctggctaatttctgtatttttagtagagacagagtttcaccatgttggccaggttggtctcgaattcctggcctcaggtgatcctcccacctcagcctcccaaaatgctgggttacaggcccgagtcacagggcctggcctagccctatctttaccattagctccattttacaagttgtcatggggggtagtacacagaaggatcgcgcagctaaaaagcaacagggttgggagtggaaaccaggtttgtgtcctcctctcttcttcggctccctagtcgccttggggagttcccaccaatggggcccaaacctgatcatcaaaatcaacaggaaacatcttcaaaaagggtccagggcccgcc

SEQ ID NO: 280 - DNA, 245 bp, Homo sapiens
ccgcggtggcggccgcccgggcaggtacgcggggtaactttttaactttataaacttagtattttaactttttaaacttttttgttgaaaactaagacacaaaaacacatgttagcctagatccacacagggtcagggtcatcagtatcactgtcttccacctccacattttgtctctggaaggtcttcaggggcaataacacacatggagctgtcatcgcctgtggtaacaacgcagagtacct

SEQ ID NO: 281 - DNA, 192 bp, Homo sapiens
cgaattggagctccacccgcggtggcggccgcccgggcaggtacgcgggctcctacttggataactgtggtaattctagagctaatacatgccgacgggcgctgacccccttcgcgggggggatgcagtgcatttatcagatcaaaaccaacccggtcagcccctctccggccccggccgctctagaactat

SEQ ID NO: 282 - DNA, 367 bp, Homo sapiens
ggaccgagggtttggtgcacctcgatttggaggaagtagggcagggcccttatctggaaagaagtttggaaaccctggggagaaattagttaaaaagaagtggaatcttgatgagctgcctaaatttgagaagaatttttatcaagagcaccctgatttggctaggcgcacagcacaagaggtggaaacatacagaagaagcaaggaaattacagttagaggtcacaactgcccgaagccagttctaaacaattatttttactaaaatgcataattatgtgatagttatacatataccaacctgttatgtgagacaagctgacctgcaagtagtccaaggccagtgaatcaattactgcttgtacct

SEQ ID NO: 283 - DNA, 376 bp, Homo sapiens; identical to SEQ ID NO: 197

SEQ ID NO: 284 - DNA, 328 bp, Homo sapiens
ccgcggtggcggccgaggacgcgggcaagcccaaggttaaaaaggcgggcggaaccaaacctaagaagccagttggggcagccaagaagcccaagaaggcggctggcggcgcaactccgaagaagagcgctaagaaaacaccgaagaaagcgaagaagccggccgaggtaccaatagcaggagcagaaaggccaaaatcatgagcgcaattgctgcgggtcccaggcccacataggagtcatgctgtgcttccctgcagccgctgccatgcagacactcacaaactgtgagtgtaaggacctgcttttcaggacaactaaaaccctga

SEQ ID NO: 285 - DNA, 229 bp, Homo sapiens
  misc_feature 104, 161: n = A,T,C or G
ccgggcaggtacgcggggtaactttttaactttataaacttagtattttaactttttaaacttttttgttgaaaactaagacacaaaaacacatgttagcctanatccacacagggtcagggtcatcagtatcactgtcttccacctccacattttgtctntggaaggtcttcaggggcaataacacacatggagctgtcatcgcctgtggtaacaacgcagagtacct

SEQ ID NO: 286 - DNA, 450 bp, Homo sapiens
  misc_feature 126, 398: n = A,T,C or G
ccgcggtggcggccgcccgggcaggtacgcggggagagggagctgggcagggcacagcagggcaggagtgtgtttgatgtgtcctgggaaccgccctgaggccgtcgtgtggctggagtgctgcangtgtcaaggaaattgtaggagatgtctcctgagtgtgatggaatataaccagatttccagaaggaactgacatgatctgacttaaaaaggccacctacatttacatgaaggccgcctacctcagcatgtttgggaaggaggaccacaagccgttcggggacgacgaagtggaattatttcgagctgtgccaggcctgaagctcaagattgctgggaaatctctacccacagagaagtttgccatccggaaagtcccggcgctacttctcttncaaccctatctcgctgcagtgcctgctctggaaatgatgtacctcgggcgct

SEQ ID NO: 287 - DNA, 56 bp, Homo sapiens
  misc_feature 16, 22, 28, 31, 39: n = A,T,C or G
tcaactttattgatanccgtcnaacttngangggggggncccggtcccaacttttg

SEQ ID NO: 288 - DNA, 463 bp, Homo sapiens
  misc_feature 313, 404: n = A,T,C or G
cgaggtacccagggaacaaatgctactgggactccacacctacctaagaagcagctctacccagactccacatggctctctgttttggtctggagaccccagctggggtatctcctgagcccagggattcaaaggttcgtggcagaaatatgcatcccacgggactctcactcactcaccattttcttgtagggggattcccctgggtctgtgccactcctgggtgaatggctgatctgtctcactcttctccgtgatccgaaggtcacactatgtcactgatgaatccttatgtgtccacctggatgttccngttgaagagctagtgtctcaccactctttctgctatttgtgagaagtggcacacactagctgcttctagtcaaccatcttggccccacctnactcccttttctcaagtaatcaaagaccagaaaggatgtcctttacaaagagcagatcc

SEQ ID NO: 289 - DNA, 123 bp, Homo sapiens
  misc_feature 118: n = A,T,C or G
ccgcggtggcggccgaggtaccgcgggatagtaacttcttatggaattgatttgcattgaacacaaactgtaaataaaaagaaatggctgaaagagaaaaaaaaaaaaaaaaaaaaangtcct

SEQ ID NO: 290 - DNA, 396 bp, Homo sapiens
  misc_feature 6, 77, 346, 357: n = A,T,C or G
gtggcngcccgggaccgagggttcggtgcacctcgatttggaggaagtagggcagggcccttatctggaaagaagtntggaaaccctggggagaaattagttaaaaagaagtggaatcttgatgagctgctaaatttgagaagaatttttatcaagagcaccctgatttggctaggcgcacagcacaagaggtggaaacatacagaagaagcaaggaaattacagttagaggtcacaactgcccgaagccagttctaaacaattatttttactaaaatgcataattatgtgatagttatacatataccaacctgttatgtgagacaagctgacctgcaacgtagtncaaggccaagngaatcaattactgcttgtacctcggccgctctagaacta

SEQ ID NO: 291 - DNA, 205 bp, Homo sapiens
  misc_feature 103, 160, 168, 194, 199: n = A,T,C or G
aggtaccatattaagtggagagctgcagcaaggtggcccctacagcccgcaaaccagcctgcacattacctctccatactgcagccctttatatggaaacttnttacatcactttgctgtgtgtgttacacaaggtggggttttgctgtacctgccccgnaccggccntttctagaactagttggatccccggncctgnaggaat

SEQ ID NO: 292 - DNA, 81 bp, Homo sapiens
  misc_feature 30, 31, 57, 60: n = A,T,C or G
agctgtttcctggtgtgaaaattggtattnngcttcacaattccacacaacaatacnaancccgggagccataaaagtgta

SEQ ID NO: 293 - DNA, 362 bp, Homo sapiens
  misc_feature 45, 108, 111, 223, 284, 353: n = A,T,C or G
ccgggcaggtacttttttttttttttttttttttttttctgaggncagcgtatgtgtatttggtggggaaaacctaatttcggggatttctgtggtaggtaatagganaanaaagggcactgggggctgttctccttccttccctgggctgtatccatggactcctgtggctgtcaggcagggggattgtgatgggagcagctttcctggagtccttcacagnggcgtttaccttcatagttgatacaaccattgctgtcctcatgccctgccaccagcatctntacttcttcctctgtcatcttctcacccagtgtgacaagaacatgccggatttcagcacccatgacggngccatttcc

SEQ ID NO: 294 - DNA, 452 bp, Homo sapiens
aggtactcatttaacaggccgtgatttttctcccgccccctttgttgttccaaaagagtgatttatatggaagtttacactagtgccaaataccactgtagttaaaatgagaccagtatcatggcctaattctaacgtcccagcagctttgaacaatcatgatttattttcttaaatcaaatttcaactcaagctgcttgacagaagcttgtcaatacatgtgctgtattttttttgcatttgttgaaaaattgcacatatagaattccaaacatttctcctggtaggttcagttacacaaatacatgttctatagaacactgagaggttacttttgagttaagtccacaaatcttccataagttcaacctaatcagttaccagttcaagaagatcttgaaggtggtaaactagcaggaacttcagatttaggaaacccgcgtacctgcccg

SEQ ID NO: 295 - DNA, 367 bp, Homo sapiens
aggtacaagcagtaattgattcactggccttggactacttgcaggtcagcttgcctcacataacaggttggtatatgtataactatcacataattatgcattttagtaaaaataattgtttagaactggcttcgggcagttgtgacctctaactgtaatttccttgcttcttctgtatgtttccacctcttgtgctgtgcgcctagccaaatcagggtgctcttgataaaaattcttctcaaatttaggcagctcatcaagattccacttctttttaactaatttctccccagggtttccaaacttctttccagataagggccctgccctacttcctccaaatcgaggtgcaccaaaccctcggtcc

SEQ ID NO: 296 - DNA, 474 bp, Homo sapiens
aggtactgtccaactggatgctgccctggtggctgaaggcacacttcatgatgctgtccagggtcatcagggagacatgttgaaagagctccagacgtgagttttgggcaatgtgttcctcccatttgttcagcatcatccgaacactctcagacatcatggtgatgaatattttcagaatgctgatgttgaagccaggtttcacaatctggcggtgctttttccatttagaaccatccagggtcacaagtcctcgaccaacccaggattcaaggattttgtggctaacagcacttttgggatcttgtcttttcaggagaatcttggcatagtctgggtcatggacactgaagaacatcgtaaagggtccaacccacaagggaacagcacatgggtatttttccatcagcttatgatacacctcaaactcctttactgggtaaaactccttgtggccatagaaccagtgggcag

SEQ ID NO: 297 - DNA, 537 bp, Homo sapiens
aggtacaagttgtctttatgctgcgagataagtcctctcttggtttgagctcccaccttttcagtgaactcttacattttgggggatctgctcttgtaaaggacatcctttctggtctttgattacttgagaaaagtgagtgaggtggggccaagatggttgactagaagcagctagtgtgtgccactctcacaaatagcagaaagagtggtgagacactagctcttcaaccggaacatccaggtggacacataaggattcatcagtgacatagtgtgaccttcggatcacggagaagagtgagacagatcaaccattcacccaggagtggcacagacccaggggaatccccctacaagaaaatggtgagtgagtgagagtcccgtgggatgcatatttctgccacgaacctttgaatccctgggctcaggagataccccagctggggtctccagaccaaaacagagagccatgtggagtctgggtagagctgcttcttaggtaggtgtggagtcccagtagcatttgttccctggg

SEQ ID NO: 298 - DNA, 264 bp, Homo sapiens
tagggcgaattggagctccccgcggtggcggccgcccgggcaggtacgcggggtaactttttaactttataaacttagtattttaactttttaaacttttttgttgaaaactaagacacaaaaacacatgttagcctagatccacacagggtcagggtcatcagtatcactgtcttccacctccacattttgtctctggaaggtcttcaggggcaataacacacatggagctgtcatcgcctgtggtaacaacgcagagtacct

SEQ ID NO: 299 - DNA, 441 bp, Homo sapiens
  misc_feature 366, 394: n = A,T,C or G
ccgggcaggtactgtccaactggatgctgccctggtggctgaaggcacacttcatgatgctgtccagggtcatcagggagacatgttgaaagagctccagacgtgagttttgggcaatgtgttcctcccatttgttcagcatcatccgaacactctcagacatcatggtgatgaatattttcagaatgctgatgttgaagccaggtttcacaatctggcggtgctttttccatttagaaccatccagggtcacaagtcctcgaccaacccaggattcaaggattttgtggctaacagcactttttgggatcttgtcttttcaggagaatctcggcatagtctgggtcatggacactgaagaacatngtaaagggccaacccacaagggaacagnacatgggtattttttccatcagcttatgatacacctcaaactccttt

SEQ ID NO: 300 - DNA, 696 bp, Homo sapiens
  misc_feature 421, 516, 557, 558, 603, 607, 616, 632, 647, 654, 666, 681,684: n = A,T,C or G
atagggcgaattggagctccccgcggtggcggccgaggtacaatgttgtctttatgctgcgagataagtcctctcttggtttgagctcccaccttttcagtgaactcttacattttgggggatctgctcttgtaaaggacatcctttctggtctttgattacttgagaaaagtgagtgaggtggggccaagatggttgactagaagcagctagtgtgtgccactctcacaaatagcagaaagagtggtgagacactagctcttcaaccggaacatccaggtggacacataaggattcatcagtgacatagtgtgaccttcggatcacggagaagagtgagacagatcagccattcacccaggagtggcacagacccaggggaatccccctacaagaaaatggtgagtgagtgagagtcccntgggatgcatatttctgccacgaacctttgaatccctgggctcaggagataccccagctggggtctccagaccaaaacagagaccatgtggagtntgggtagacctgcttcttaagttaggtgtggaatcccagtnngccattttgttccccttgggtacctggccccggggcggccgtttnttanaacttagtnggaatcccccccggcntgcaaggaattttcnaatatanaagcctttattngatacccggtcgaanctngaaggggggggg

SEQ ID NO: 301 - DNA, 154 bp, Homo sapiens
aggtacacgtctctgtctgggcctcggccagggtgccgagggccagcatggacaccaggaccagggcgcagatcaccttgttctccatgggggccattgcctcctctctgctccaaaggcgaccccgagtcagggatccccgcgtacctgcccg

SEQ ID NO: 302 - DNA, 420 bp, Homo sapiens
  misc_feature 10, 94, 125, 144, 191, 197, 223, 225, 226, 235, 238, 273,282, 283, 288, 289, 299, 308, 309, 311, 356, 389, 391: n = A,T,C or G
gttaattgcncgcttggccgttaatcaatgggtcataagcttgttttcctgtggtggaaattgttatcccgctcacaaatttctcacaccaacnataaccgaaggccgggggagcaataaaagtngtaaaagcccctggggggngcccttaaatggaggtggaagcttaaacctcaacatttaaaatttgncggttngcggccttcaacttgcccccgctttntnncaattccgnggnaaaacccttgttccgatggccccagcctggccaanttaaaatgnnaaatnnggcccaaacngccgccggnngnaggaagggccgggtttttgccggtaatttggggccgcctcctttnccggcttttcccttcggtttcacctggacttcntnttgcggcttcgggtcccgtttccggcttg

SEQ ID NO: 303 - DNA, 159 bp, Homo sapiens
aggtacactcttccttaagtccagtggtgcaggaaagcttcagtttgtcaatatcacgcaagacagggacaccaaacactacccctgcccaaaggagcccctcacggacgccgccatgttgttaccggacccgagcaccgctccccgcgtacctgcccg

SEQ ID NO: 304 - DNA, 347 bp, Homo sapiens
  misc_feature 32, 36, 93, 136, 142, 155, 171, 242, 265, 292, 293, 298,310, 334: n = A,T,C or G
aggtacgcggggacggttcgtttttcctttantcangaaggacgttggtgttgaggttagcatacgtatcaaggacagtaactaccatggctnccgaagttttgccaaaacctcggatgcgtggccttctggccangccgtntgcgaaatcatantggctgtagtatccgntgctatccctgggggttgcagctttgtataagtttcgtgtcggctgatcaaagaaagaaggcaatacgcanatttctacatgaaactacgatgntcatgaaagcattttgagcgagatganngaagngctgggtatctnttcaggagtgtaaaggtaatcttngggaaatataaaa

SEQ ID NO: 305 - DNA, 537 bp, Homo sapiens
  misc_feature 380, 381, 387, 388, 389, 400, 412, 426, 430, 452, 471, 481,485, 495, 503, 508, 521, 523: n = A,T,C or G
aggtacagtggccccccgtgaaagacagaattgtggttttcctggtgtcacgccctcccagtgtgcaaataagggctgctgtttcgacgacaccgttcgtggggtcccctggtgcttctatcctaataccatcgacgtccctccagaagaggagtgtgaattttagacacttctgcagggatctgcctgcatcctgacgcggtgccgtccccagcacggtgattagtcccagagctcggctgccacctccaccggacacctcagacacgcttctgcagctgtgcctcggctcacaacacagaattgactgctctggactttgaactacctcaaaattggccttaaaaattaaaaagaagatcgatattaaaaaaaattannaaaacnnnatgaaaaaagngtcccttgcccngggccggcccgttnttangaactagtgggatcccccgggnctgcagggaaattccgatnttcaaacttnattngaatacccgnctacctanaaggnggggggccccggntncccaagcctttttt

SEQ ID NO: 306 - DNA, 666 bp, Homo sapiens
  misc_feature 4, 37, 208, 215, 226, 228, 291, 299, 332, 362, 374, 391,424, 445, 453, 463, 479, 483, 495, 504, 505, 512, 516, 519,532, 556, 564, 602, 608, 616, 652, 661: n = A,T,C or G
gganatggggttttgctgtgttgcccaggctggtctntaactcctgggctcaagcaatcctccagcctcggcctcccaaagtgctgggattacaggcgtgagccaccgcacccggccacttgtttcttaatgagtgtctgcaactgctggggaggtgcgggtctgccggccagagctgcaggtaagtgagggtcaagctggttcacanagtgcancaactcagctnanagtcctgaacacacagcccagccctttgaaaccatcccctccagcacaaggaagacagcattntgcaaacncatccatgggagcctcaggaaaataagttttanacaagtcacgtgttcctaccttccaggcancaaagtcagtgntacagaaagcaaagtanggggatcgcaggcctctggctggagggaggccnccaaaactccctgggattagnatttcggntgactctaangccatcaggggtttanctcnacacctaaaagnctactctgnnggattcnaaancanacagttaccttgnccggggcgggccgggtttaaaaantaagtggnatccccccggggccttgggagggaaatttccaatattnaaagcntttttcanatacccgtcaaccctcgaggggggggggccccgggnacccccaanctttt

SEQ ID NO: 307 - DNA, 701 bp, Homo sapiens
  misc_feature 483, 546, 645, 661, 685, 693: n = A,T,C or G
aggtacaaagtgggagctggcactgggcagatctggctggataatgttcagtgtcggggcacggagagtacccggagcacggagatctcgccggctttacgttcacctcggtgtctgcagcaccctccgcttcctctcctaggcgacgagacccagtggctagaagttcaccatgtctattctcaagatccatgccagggagatctttgactctcgcgggaatcccactgttgaggttgatctcttcacctcaaaaggtctcttcagagctgctgtgcccagtggtgcttcaactggtatctatggggccctagagctccgggacaatgataagactcgctatatggggaagggtgtctcaaaggctgttgagcacatcaataaaactattgcgcctgccctggttagcaagaaactgaacgtcacagaacaagagaagattgacaaactgatgatcgagatggatggaacagaaaataaatntaagtttggtgcgaaccgccattctgggggtgtcccttgccgcctgcaaagctggtgccgttngagaagggggtccccctgtaccctgcccggggcggccgctctaagaactaggtgggatcccccgggcctggcaagggaatttcgatatcaaagcctttntcggatacccgggcgnccctcggagggggggggcccgggnacccccanctttttgg

SEQ ID NO: 308 - DNA, 235 bp, Homo sapiens
aggtactgagcgcgcgaggctctacagagtgaaggtttaaatccaaggtcatggcaaaacatctgaagttcatcgccaggactgtgatggtacgcgggggactcggggtcgcctttggagcagagaggaggcaatggccaccatggagaacaaggtgatctgcgccctggtcctggtgtccatgctggccctcggcaccctggccgaggcccagacagagacgtgtacctgcccg

SEQ ID NO: 309 - DNA, 555 bp, Homo sapiens
agtggaaaaggctattgcccactatgaacagcagatgggccagaaggtgcagctgcccacggaaaccctccaggagctgctggacctgcacagggacagtgagagagaggccattgaagtcttcatgaagaactctttcaaggatgtggaccaaatgttccagaggaaattaggggcccagttggaagcaaggcgagatgacttttgtaagcagaattccaaagcatcatcagattgttgcatggctttacttcaggatatatttggccctttagaagaggatgtcaagcagggaacattttctaaaccaggaggttaccgtctctttactcagaagctgcaggagctgaagaataagtacctgcccgggcggccgaggtaccgagcatgaacatctgcagcctcttgcagaatcaccccagaaggggactgaatcatggtcctcttgataggtatgttcagcagagtttccagtcctgaggtgtatgaggccagctggagctcataatccttaattgaattggcgcaaagttcagcaattttttgtcctgcccg

SEQ ID NO: 310 - DNA, 642 bp, Homo sapiens
  misc_feature 537, 572, 608, 611, 620, 629, 630: n = A,T,C or G
agtggaaaaggctattgcccactatgaacagcagatgggccagaaggtgcagctgcccacggaaaccctccaggagctgctggacctgcacagggacagtgagagagaggccattgaagtcttcatgaagaactctttcaaggatgtggaccaaatgttccagaggaaattaggggcccagttggaagcaaggcgagatgacttttgtaagcagaattccaaagcatcatcagattgttgcatggctttacttcaggatatatttggccctttagaagaggatgtcaagcagggaacattttctaaaccaggaggttaccgtctctttactcagaagctgcaggagctgaagaataagtacctgcccgggcggccgaggtaccgagcatgaacatctgcagcctcttgcagaatcaccccagaaggggactgaatcatggtcctcttgataggtatgttcaagcagagtttccagtcctgaggtgtatgaggccagctggagctcataatccttaattgaattggcgcaaagttcancaattttttgtacctgcccgggcggccgcttctanaactagtggatccccccggcttgcagggaattcganatnaagcttatngataccgtnnactttagggggg

SEQ ID NO: 311 - DNA, 714 bp, Homo sapiens
  misc_feature 589, 656: n = A,T,C or G
aggtaccagcagaccccaggccagtctccacgcacactcattttcagcacaaacactcgctcttctggggtccctgatcgcttctctggctccatccttgggaacaaagctgccctcaccatcacgggggcccgggcagatgatgaatctgagtattactgtgcgctgtatatgggtagtggcatttgggtgttcggcggagggaccaagctgaccgtcctaggtcagcccaaggctgccccctcggtcactctgttcccgccctcctctgaggagcttcaagccaacaaggccacactggtgtgtctcataagtgacttctacccgggagccgtgacaagtggcctggaaggcagatagcagccccgtcaaggcgggagtggagaccaccacaccctccaaacaaaagcaacaacaagtacctgcccgggcggccgctcgacccgggcaggtacgcgggggggcaaaaaaatcaaggtatttggtcccggaacaaagcttatcattacagataaacaacttgatgcaagatgtttcccccaacccactatttttctttcctttcaattgctgaaaacaaaagctccangaaggctgggaacataccttttgtctttctttggagaaaattttttccccttgatgtttatttaagnatacatttgggcaaagaaaaaggaaagagccaaccacggattcttggggatcccaagg

SEQ ID NO: 312 - DNA, 268 bp, Homo sapiens
gcattgaatcaacctcagccaccatctgcttttaacagccaggagaaaccagtagtagccagcagatcgcgcctaccaaccagtttcaccaactagcaggtaactccgggtttccaatctgtccatccagggaggaagaaatgcaggaaatgaaagatgcatgcacgatggtatactcctcagccatcaaacttctggacagcaggtcacttccagcaaggtggagaaagccaatcacacatcaagagatgaagacactgcagtacct

SEQ ID NO: 313 - DNA, 229 bp, Homo sapiens; identical to SEQ ID NO: 139

SEQ ID NO: 314 - DNA, 204 bp, Homo sapiens
aggtacgcggggacaccaaacaactcattacacaaagaggtaaggtcccagaccacgccaaagcttcctgagacctctcctcatctgtgcatggacggatgaccaactctggggcccaggctgttgcttcccagtataatgatgaatccgccatagtctggtgagtgtagaggctgactctggagcccaagctgtacctgcccg

SEQ ID NO: 315 - DNA, 386 bp, Homo sapiens
  misc_feature 330, 378: n = A,T,C or G
ccgggcaggtaccactctttaccaaactgctaaaggaatcgaaaccttctccagaggtcaaatggtcaggaattcgagtaaggcacactctcaaatccttagtaaggccaaatatctttttaaattcagcatcactcttcagatgtaatgccttattacttcttccttgagaatctttcttgtcatttcttccttgggcacctttatctgatgttgatgccatctcattatggatctttggttcttggtctctaaaaacacactgttgtgaagtaacagttgttgcatcaacagaggaacttattttctctatgctctggaggacacttncttttctagcataaatgacggctgttacttttctgggggcattgtgtnctgtacct

SEQ ID NO: 316 - DNA, 668 bp, Homo sapiens
  misc_feature 383, 418, 487, 589, 597, 631, 650, 660: n = A,T,C or G
ccgggcaggtacccagggaacaaatgctactgggactccacacctacctaagaagcagctctacccagactccacatggctctctgttttggtctggagaccccagctggggtatctcctgagcccagggattcaaaggttcgtggcagaaatatgcatcccacgggactctcactcactcaccattttcttgtagggggattcccctgggtctgtgccactcctgggtgaatggctgatctgtctcactcttctccgtaatccaaaggtcacactatgtcactgatgaatccttatgtgtccacctggatgttccggttgaagagctagtgtctcaccactctttctgctatttgtgagagtggcacacactaagctgcttntagtcaaccatcttggccccacctcactccttttnttcaagtaatcaaagaccagaaaggatgtccttttacaaaggagcagatccccccaaaatgttaagaanttcacttgaaaaaggtggggaagctcaaaccaaagagagggactttatcttcgcaagccattaaagacaacctttgtaccttcgggccgctctaagaactangtgggatncccccggggcctgcagggaattcgattatcaaanctttatcggaatacccggncgaaccttcnaagggggg

SEQ ID NO: 317 - DNA, 644 bp, Homo sapiens
  misc_feature 143, 322, 367, 382, 393, 398, 404, 407, 411, 439, 446, 491,529, 531, 552, 580, 581, 589, 630, 633: n = A,T,C or G
ccgggcaggtacccatgggagatggactggcttgttctttgggtcaactgcagcttattggaggtgttgatatggcacttagggtctttgctcccttgatatatcttctgagggtagcaagggcaattctactgcagaggcantggcagaaaggatttcatttgctcctggaagctctgtccaaaaaactgctgagttgctactggcttgatagctccggtggtgggctggctagagacccaggccaggaggacctgcccatcaagtagagtccggtcaattttctgtagggctgctgtggtatgctggggggtccctccantcccctaattgcctcatattttttcccaggggaagaatgatagcnctgcccccttttctnttgggaagctnttgtnccttcnggnccgncccgggccagggttacttttttttttantttgacnaggagggaacaatgcccttttaaaaaaatatttttaattggggtngaaaacttttcttaattctcaaggaaaaccttttgggntncttttaatataaatttaattnatgctctttaaaaatttctgtttggatnnaaaagcanttggtattattattaaaataccctgttaaaagaaaaaatantantttttaaaaat

SEQ ID NO: 318 - DNA, 229 bp, Homo sapiens; identical to SEQ ID NO: 139

SEQ ID NO: 319 - DNA, 303 bp, Homo sapiens
ccgcggtggcggccgaggtacaagccttgaacatcgtcctgcttcccagtgggttcagacctcacctctcagggagcgacctgggcaaagacagagaagctcccagaaggagagattgatccatgtctgtttgtaggacggagaaaccgcttgggtaacttgttcaagatatgatgcatgttgctttctaagaaagccctgtattttgtgattgccttttttttttttaagatgctttcattttgccaaaataaaacagataatgtggatggtttaagggttatagtattatagtttaaataa

SEQ ID NO: 320 - DNA, 680 bp, Homo sapiens
  misc_feature 313, 394, 419, 441, 446, 471, 478, 480, 482, 505, 510, 512,517, 540, 541, 544, 554, 556, 559, 561, 562, 567, 597, 602,613, 614, 615, 618, 619, 635, 641, 643, 646, 647, 648, 654,656, 670: n = A,T,C or G
aggtacgcgggtaaacttggcatttccaaaggagtaatgcccccatcttgtatgtaactccaactcaaaggaacaaaagagagggccaattttatatgaagttttattctcaaaatataaaaaaaaaaacaaaaaccccacacaccaagggactaagatgatgttatttcacagcacttgcttgcctcagtctttacgaagaacacaattccaaactaatggacaagttcctccctgtgctctaggtcattcaaaggaggcaagctccttttgtcaaatcaggagctccatcagctgatcaggagcccagatnccagggtggatttttctcagtgggatctagtattgctagaagagccttccttacatggcaagaaacaggcacatgggcctntttcctttagaatgcatcttgtctnacatgctttggggactgcttgngccangaaccaccttggtgttggcctggcnaaggcancntnttacatgggcccccccaaaaacntgggncntggcnatttttttttcccggcttttttnncangccccccttnanggnannaagcncccattgccacttggtggggcttggggtanttttnccgggaattcnnnttnntttctccccgcaaaanaaaaanantcnnnggaaantncgggtttttttttnagggggaaaa

SEQ ID NO: 321 - DNA, 229 bp, Homo sapiens; identical to SEQ ID NO: 139

SEQ ID NO: 322 - DNA, 263 bp, Homo sapiens
  misc_feature 63, 71, 90, 145, 169, 198, 222, 223, 241: n = A,T,C or G
cccataatggctatttattggatcagcaatttataagtcccacattctcatgccacatagctntacacagntgcaaaaatataccatagnttgcaggggatcattggtttgataaaagatattgagtcgctcattttgtgaaagngacctttgatataagaggagcatnacgcggggaaagctcacatgtcccgtggntcacacaccagaaggtatttgcgnnttgtcattgctgtctggnaggccatggcaatggctttttt

SEQ ID NO: 323 - DNA, 319 bp, Homo sapiens
  misc_feature 61, 64, 76, 77, 86, 93, 99, 118, 124, 144, 163, 219, 220,253, 264, 266, 274, 290, 303: n = A,T,C or G
ccacacacaggacacacacaaatgcatgccccatgatcgcactcaggaaaaaacccacggnctnccatatggctgnnaacaaactntagtttntaccantcctgatggtgagcacgantatgtngaaagaagcaggcacagcanaagagttcgttgtgctcgnggtcatgtaaatgttgtatctggtgaaggtgggtcattgttacatgactgaattgnntcccttcaaaattcataggctgaagccctagtnaccgtttttgnanacagggtnttttaggaggttattnaggctaaatgaantcttaagggggggccc

SEQ ID NO: 324 - DNA, 713 bp, Homo sapiens
  misc_feature 365, 421, 426, 434, 454, 457, 473, 520, 550, 559, 562, 566,579, 584, 591, 593, 606, 614, 622, 652, 659, 662, 663, 664,678, 685, 694, 699: n = A,T,C or G
ccgggcaggtacccagggaacaaatgctactgggactccacacctacctaagaagcagctctacccagactccacatggctctctgttttggtctggagaccccagctggggtatctcctgagcccagggattcaaaggttcgtggcagaaatatgcatcccacgggactctcactcactcaccattttcttgtagggggattcccctgggtctgtgccactcctgggtgaatggctgatctgtctcactcttctccgtgatccgaaggtcacactatgtcactgatgaatccttatgtgtccacctggatgttccggttgaagagctaagtgtctcaccacttctttctgctatttgtgagagngggcacacactagcttgcttcttagtcaaccatcttgggccccacctcaccttaanttttnttcaagtnattcaaaagacccaaaaaanggntgtcccttttacaaanaagccagaatccccccaaaaaatgtaaagaagttcactggaaaaaanggtggggaagccttcaaacccaaggagaanggacctttnttntttnccagcattaaaangaccnactttgngncctccggggccgncttcttanaaacttangtgggaatcccccccgggccttggaagggnaatttcngannnttccaagcctttantcgaatncccggccgnacccntgaggggggggggc

SEQ ID NO: 325 - DNA, 156 bp, Homo sapiens
  misc_feature 10, 12, 19, 31, 32, 33, 37, 57, 65, 69, 80, 88, 91, 98, 102,106, 133, 154: n = A,T,C or G
aggtactgananaaaaatntgctctgtgggnnnagcntatccagtccacagcccctntcttggtnattnataaagacaangatctgcnctnagggatncctnagcnattctccaatctccatctcacggtacnacaatcaccttgaccatcagngg

SEQ ID NO: 326 - DNA, 536 bp, Homo sapiens
  misc_feature 411: n = A,T,C or G
ccgggcaggtaccacttttatcacatgcagctgccttaaccaacaggttttctaagatactatcccccttacctgtttctgcctctttcaatggtgtttttccatttttacagacttctgaaaattttagctttcattgaaataagcttccccattccttcatgttaatatatctagcaatattgaatagaaattataaatggaaataaaaatgcttgcttttataaaatctccagtctcgcagcacccccaatataatacaaacagacttaagttgaaatttggtttgttaatgcccaccttgtgtggtcaaaacacagttttgaaggaatgaccaccttcaatgttctttacagcttctttagtgttacttaaaaaaaaaaaatcaatctgatggatgattgatggtangtttgttcatggaagatcttcatcttatgggaattatctagtttttctaatcatatactaccaacaaaaataaacacaagcgtgttccctttaatcatattatcctccaccattacttccaaaag

SEQ ID NO: 327 - DNA, 505 bp, Homo sapiens
  misc_feature 16, 18, 24, 27, 29, 35, 43, 45, 46, 51, 54, 65, 67, 70, 82,83, 90, 92, 94, 101, 108, 135, 137, 138, 139, 142, 151,152, 156, 161, 168, 172, 180, 200, 257, 296, 299, 306, 319,360, 365, 367, 378, 382, 397, 400, 409, 417, 420, 425: n = A,T,C or G
  misc_feature 437, 448, 451, 459, 468, 497: n = A,T,C or G
ccgcggtggcggccgncnggccangtncnactaanatcttcantnnactancangataaacaggncnatnaataactgaggnnaagcccnantngcaaggncacacangaaagaatcagaccacgaaatgagctncnnntgncacctgcanngggngcacnatgaggntttntgaactcnatgagctaccgagccacggnttctcgatgtagcactcttattagtgtcgccctgcggcgccggtctacaagcgacgnggtctgttttatccattataccacaggggaagggaccgnttnagtgctncgaaggttatacncagtactgtaatccacaggcacaagaccacctactcattgngcatncnccaagctctcntggnccagaacaccttctnagnatgctatgngggcattnctngcgcncaagctcggtangggaaataaanatntattattnggcctttantccaattaccctggccttaatccctctgngggggggg

SEQ ID NO: 328 - DNA, 414 bp, Homo sapiens
ccgcggtggcggcccgaggtacaaagtgatcaaacctgtctattaattaagcaaatgagtggtgaatcactgagacggctggatggctgagctgagggatgtgatgtgtgcccaacgtcctgcagggtgctggtgaataacatgagaaagaacttaaaatggcttgatgatctcaccatttagtgaccttggttgtcacactgctttccaagagccctttaaaggtaggaatgagagctgtttccagtatgcattccaataggaatgcagctttgctaaagttagagacataaactaaaaccctgtgaagtcctatagagcccttggacttatttcctagcaagcatttatcatccccaccatcctctacttcaggacacccgcgtacctgcccgggcggccgctctagaacta

SEQ ID NO: 329 - DNA, 610 bp, Homo sapiens
  misc_feature 499, 505, 600: n = A,T,C or G
tcctatagggcgaattggagctccccgcggtggcggccgcccgggcaggtactaatcatcctgtcccaacaaccatccaatccacaccccatctactcccacaacttttgtaagcaaataacagcccaacgttttatccacaaatgtttccgtatgtatttctaaaagataaggcctttttcttaaactacccacatcgtcacactcgaaaaaaagtagtgactgcttgatattagatattcaattacgttaaaatttccaattatctcacaaatgccgcacatttaaaaattttttttattcaatcacaaatcatgtccatattatagaacattgggatttgaactcaggcctgcttccaaaacttgtatactgccaactttgtcatgctataagaatgcatgcatggagagagacaagacagaaataaagcctttcttgtcctttaaatgtcctgctctgcagtaggaattgtaaggtaggtaagtaaatagatgtnctgaangctacctctgaccttttaaaatctttgacatagataggttgagaaggcagcaatatacctttaaccaaactaactaccaaaggaaatttggaaangggcaccaga

SEQ ID NO: 330 - DNA, 230 bp, Homo sapiens
  misc_feature 135, 159, 166, 170, 176, 195, 201, 203, 207, 210, 213, 214,217, 226: n = A,T,C or G
aggtactgcctgcctctagtgtcgcgtccctccagtatccgatgggagcgccgtccgcagggaatgtgtctctctgatcatggtgtctcgtgtccaactctgggggaagaccgagacaaatcgagtcactggtgntgggaaaaggcttatttccgcttncgcttgnccantttcangaatttgattctgagagcngggctncngttncangcnnggnttgtacctncccg

SEQ ID NO: 331 - DNA, 244 bp, Homo sapiens
  misc_feature 22, 30, 37, 51, 52, 56, 57, 59, 62, 74, 77, 79, 80, 84, 86,87, 89, 92, 97, 99, 117, 126, 127, 134, 140, 141, 144, 150,151, 156, 159, 161, 164, 167, 172, 177, 180, 195, 198, 199,200, 202, 208, 212, 221: n = A,T,C or G
cggcggccgcccgggcaggttnacatggtncggcttnaatactcccagttnntganncngcncacaagccctgngancnnggcnanntnccnatatncngagactgacagggcttantaagaaccnncccatcngacatnnganggagannaaggngcngnacnagnccgcngaaanaancataccctgagaatnccnnncnaccaanaggnatttgagcngcctgtttgatgtaagaaaagga

SEQ ID NO: 332 - DNA, 208 bp, Homo sapiens
  misc_feature 36, 39, 48, 52, 57, 61, 76, 79, 82, 92, 93, 96, 97, 98, 103,104, 109, 119, 133, 135, 136, 139, 146, 151, 152, 154, 156,159, 161, 171, 173, 183, 191: n = A,T,C or G
tatcggcgaattgtagctccccgcggtggcggccgnccngccatgtangctngatancctncaacccagaaagatntanttncgcgagcacnnctnnngccanntagcnagacattttnacccgaatgccgtnannttnaggaatnccctnntncngantnttttgcttcntnccacccctanggggaaanactgctttgtgctttgg

SEQ ID NO: 333 - DNA, 241 bp, Homo sapiens
  misc_feature 3, 22, 28, 57, 65, 123, 183, 230: n = A,T,C or G
gcnccactgcactccagcctgngtgacngatcaagactctgtcttaaaaaaagaaanaaaataangtgaatatcagtattgcttgaaaattcctagaatatttggataaaactttaaatgaanacatgaataactgactttgggaactgtaattgtaccaaattttgtttttccaaaaacaanaaagtaaccttggttcccaatacaaccagaattttgatattccttgnactgcatgcct

SEQ ID NO: 334 - DNA, 187 bp, Homo sapiens
  misc_feature 16, 63, 71, 79, 100, 125, 128, 134, 144, 151, 163, 164, 169,178: n = A,T,C or G
ctgtctcactgactgnggatgaggatgggaggtcagctactcactggttttcactgacattangggtatanggaaccanagtgctgactagccctgactngctctactgtattcaatctcattgntgncaggtntatatggggngtgagtntatcataacacnnactancactacctnacactacca

SEQ ID NO: 335 - DNA, 138 bp, Homo sapiens
  misc_feature 12, 20, 31, 32, 33, 36, 40, 45, 55, 61, 62, 65, 77, 84, 95,98, 103, 126, 130: n = A,T,C or G
aggtacccgggnacctgatncatttctaccnnnctntagnagaancacatcttantggtgnnatncgtctgttcttnctcacgnatgccgccccnacnaggcntgacagaccatactaggccatangcancgacttgt

SEQ ID NO: 336 - DNA, 242 bp, Homo sapiens
  misc_feature 40, 67, 68, 71, 72, 73, 74, 78, 79, 86, 95, 97, 99, 102,103, 104, 106, 108, 109, 111, 112, 113, 117, 120, 125, 131,132, 151, 154, 155, 156, 157, 158, 162, 170, 172, 175, 192,193, 197, 198, 205, 208, 210, 212, 213, 217: n = A,T,C or G
tggagctccccgcggtggcggccgcccgggcaggtacttnctttttttttttttttttttttaaaannccnnnnaaannggggatnccccggggnananccnnngncnnannngagnaanaaggnggtaannaaaaaaggctccctgaatnaannnnntttngccctatnanggnggttttttattgccccnnggcnngaatatnccncncnnaaanggccccccgcttttttttttttttt

SEQ ID NO: 337 - DNA, 337 bp, Homo sapiens
  misc_feature 13, 18, 20, 21, 37, 38, 41, 44, 49, 51, 52, 58, 66, 69, 70,72, 80, 86, 89, 96, 97, 103, 106, 111, 112, 117, 121, 122,124, 129, 132, 134, 136, 137, 139, 155, 159, 163, 164, 166,167, 169, 184, 188, 189, 190, 193, 198, 200, 205, 217: n = A,T,C or G
  misc_feature 220, 221, 223, 224, 225, 226, 229, 234, 236, 237, 248, 253,258, 259, 263, 264, 268, 269, 270, 271, 272, 279, 280, 285,289, 291, 302, 305: n = A,T,C or G
acgtaccaggatntacantnnaaccatcttttccggnnagnccncaagnannagctgngcccctangannanaaagaccnacgganccnggggcannttgatnacnatggnnaccancccnngngtacntgncngnncngacgttttaaaactanaggnttcnncnntntgaaggaattggatntcannnttnttganancgttnacttctaagggnggnncnnnnccnacttntnnttccctttagnaatgnttaanngcanncttnnnnnaataatnntcatncttntnaactgggtcanganattttgccgtatgaacatcacagagtgtacct

SEQ ID NO: 338 - DNA, 663 bp, Homo sapiens
  misc_feature 88, 116, 176, 193, 314, 317, 327, 336, 344, 353, 382, 410,416, 423, 426, 429, 430, 432, 438, 459, 462, 463, 480, 487,488, 490, 494, 502, 504, 505, 513, 516, 517, 518, 519, 527,534, 535, 537, 538, 549, 550, 554, 562, 573, 574, 590: n = A,T,C or G
  misc_feature 591, 593, 598, 604, 608, 616, 638, 639, 640, 649: n = A,T,C or G
aattggagctccccgcggtggcggccgaggtacagtggccccccgtgaaagacagaattgtggttttcctggtgtcacgccctcccantgtgcaaataagggctgctgtttcgacnacaccgttcgtggggtcccctggtgcttctatcctaataccatcgacgtccctccagaanaggagtgtgaattttanacacttctgcagggatctgcctgcatcctgacgcggtgccgtccccagcacgatgattagtcccagagctcggctgccacctccaccggacacctcagacacgcttctgcaactgtgcctnggntacaacacanattgactgntctgactntgactactnaaaattggcctaaaaattaaaagagatcnatctaaaaaaaaaaaaaaaaaaaaaaanttcctnccccggncgnccnngnaaaaanccgggtttttttattcccctnaannggaaatgaaaaaatttngcctttnncntccnaatttggncnntttatttnccnnnngaactttntttaaanngnnacttttttccnntttnaaaaaaangggttgggggnnccccccggccattttnncngccanttcccntttngagaaaanaaaaaatttttttttttccccnnngaaacaaancccttaaaaaaaat

SEQ ID NO: 339 - DNA, 368 bp, Homo sapiens
  misc_feature 67, 69, 76, 79, 80, 82, 87, 91, 93, 94, 103, 104, 105, 106,108, 110, 114, 116, 123, 135, 136, 138, 141, 143, 146, 149,150, 156, 158, 159, 163, 164, 174, 175, 177, 179, 180, 182,187, 188, 189, 190, 194, 195, 200, 213, 214, 215, 222: n = A,T,C or G
  misc_feature 223, 224, 225, 228, 229, 244, 245, 255, 257, 265, 267, 268,274, 279, 281, 283, 284, 290, 294, 295, 300, 301, 307, 313,316, 326, 327, 328, 330, 332, 333, 336, 337, 338, 340, 342,343, 344, 354, 355, 357, 368: n = A,T,C or G
tggagctccccgcggtggcggccgcccgggcaggtactttctttttttttttttttttttttttaananccgcagntcnntnttatncctncnnaaaaaaaannnntntncctntngccattntttaaaaaaacnntnacntnttnttnnaaaaananntttnntttaaaaaanntngnncnaaatnnnntttnnggggnaaaaaaaaaaaannntttttgnnnnctnnttttttaaaaaaaanntttttttttntnacccaaangnnggcgtntttantntnncccccnttcnnaatgnnattttnaaaaanagntatcccccgnnncngnngannntnannnaaaatttttnnanccccccccccn

SEQ ID NO: 340 - DNA, 234 bp, Homo sapiens
  misc_feature 5, 30, 49, 59, 84, 92, 106, 113, 121, 127, 137, 177, 219: n = A,T,C or G
atctncattagggctatcattcctatccanattcccacaggctcacagntaagctactncaacagctgttgctgactaaatatnctcatgtntctaaataattatntaaatanggaacagnggattnatacctgatncctctacattaaaaaatatttctttcattattacatcaanagtaaaatatataaaacattctgcctcaatttcaaggtcttnattaagttggtacct

SEQ ID NO: 341 - DNA, 665 bp, Homo sapiens
  misc_feature 32, 33, 53, 54, 55, 71, 72, 76, 77, 79, 80, 83, 92, 93, 96,97, 100, 101, 103, 112, 118, 121, 125, 131, 132, 133, 134,135, 136, 137, 141, 142, 143, 150, 152, 160, 163, 165, 169,170, 171, 174, 175, 177, 180, 191, 192, 205, 206, 207: n = A,T,C or G
  misc_feature 217, 224, 225, 226, 227, 228, 229, 230, 232, 236, 239, 244,245, 250, 251, 252, 253, 254, 263, 266, 267, 275, 288, 289,294, 300, 301, 304, 306, 309, 316, 317, 320, 321, 327, 330,342, 351, 362, 363, 365, 366, 367, 368, 369, 370, 373: n = A,T,C or G
  misc_feature 374, 375, 380, 382, 383, 385, 393, 394, 395, 396, 397, 398,400, 401, 402, 403, 405, 414, 415, 420, 426, 441, 443, 453,455, 458, 467, 480, 481, 482, 484, 486, 489, 509, 513, 520,522, 528, 529, 530, 539, 544, 546, 548, 550, 559, 564: n = A,T,C or G
  misc_feature 575, 592, 596, 597, 606, 610, 623, 633, 634, 635, 639, 643,649, 659: n = A,T,C or G
aggtactttattttttttttttttttttttcnnttttaaaaaaaaaagggggnnntttttttaaaaaaaanngggnncnnttnccaaaaaannttnntgnntnccccccccnttttcnaangggnattttnnnnnnngggnnncccccangntttttttnttngnattnnnaanntngtnttcccccattnntttttttttttannncccccttttnaaaaaannnnnnngngaanccnttttnngcccnnnnnaaaaatttnaanntttttaanccccttaaaaaannccccntttttnnggngnccncctcccnnttnnattttnaanattttttttttnaaggggggnggatttttttnnannnnnnttnnnccccnanngnccttaaannnnnntnnnntnccccccccnntcccngggggntttttttcaaaaaantntttttttttnanccntttttgggnccccgcccccccnnntnanccntttttttttttttttaaaantggncaaaaantnacactnnnttttttttnccaananancnatttggggnaaccnccccgggggcntaaagccccgggggggntttnnggccccccncccngggtttttttttnggggggcccnnntctntttnaaaaanccaaaaaaantttttt

SEQ ID NO: 342 - DNA, 629 bp, Homo sapiens
  misc_feature 88, 92, 131, 152, 160, 165, 166, 177, 181, 197, 201, 206,208, 210, 220, 247, 261, 268, 277, 278, 304, 307, 312, 313,318, 321, 324, 329, 330, 332, 335, 336, 338, 345, 347, 349,352, 360, 365, 371, 384, 386, 388, 399, 404, 408, 411: n = A,T,C or G
  misc_feature 413, 417, 421, 434, 440, 446, 449, 451, 453, 467, 475, 479,489, 490, 494, 496, 498, 519, 556, 559, 561, 564, 580, 591: n = A,T,C or G
acgaggtaccgcgggtcaggaaggtgagggcgagacccctacccccacagagagcagcagccatggggaagggcaaaaccccaaaacnctantggaagaaaagccctatctgtgccccgagtgtggagccngcttcacagaagttcgcaagnccctactntttcnnatagggaagcnttgnccacccccagggttgntctnccctngngnaaaaatgggngttcttggtagaaactcaaggagggcnccttctgctctttnctctccnggaagtagnngaaaaccaacttgggaattttttttntgnccccnncaaanaanaanaaatnntntcnncnggggggngnanaangggggganggganttatanccccccttattcnananaattgggttanggctngggngangnttgnggangtggaaagaatanaagtanaccccnctngngngaaaaaaaaaatanttaggttngtcntttttttacnntacnangnttgtaattgtaaggtaaaaancccccttatttaaagaaaatttggtcttgggctgggnggnanagnctacctttaattaaangggccagtttnttaggaaaaaaaacctgtgttgggtgttttaagaaaaa

SEQ ID NO: 343 - DNA, 620 bp, Homo sapiens
  misc_feature 31, 226, 267, 366, 381, 431, 456, 463, 486, 530, 558, 560,579, 581, 585, 590: n = A,T,C or G
aggtacttttttttttttttttttttttttnggaaggttctcaggtctttatttgctctctcaaattccaggaattgacttatttaattaatccatcaacctctcatagcaaatatttgagaaaacaaattgatattcagattcttattttcagcagggaagtaagaagttgcagctcagtgcacataaagtttgagacagagatggagacatccagccccacctntctggaacaagaaagatgactggggaggaaacacaggtcancatgggaacaggggtcacagtggacacaaggttgggctgtctccccacctcctcacattaggcttacagggacgcagacacattcaggtgcctttgcanaaagagatgccagangctcttgaaagtcacaaaggggaggcgtgaagaaatcctgcatctcagtnccttcacaaagacaacttggtttangcttttnaagcttgtgaggagacacacccngcgttaccctgccccgggccggccgcttttaaaaactagtgggntccccccgggctgcaaggaatttcgatntnaaactttattgattccggncnaccnttganggggggggcccgggtaccccaactttttgt

SEQ ID NO: 344 - DNA, 804 bp, Homo sapiens
  misc_feature 58, 59, 63, 64, 66, 75, 76, 82, 83, 84, 89, 93, 94, 95, 96,99, 100, 101, 105, 107, 108, 114, 119, 120, 137, 140, 141,142, 146, 150, 152, 153, 154, 157, 161, 162, 167, 168, 172,173, 177, 178, 185, 189, 196, 197, 203, 206, 208, 209: n = A,T,C or G
  misc_feature 212, 213, 214, 215, 220, 221, 222, 228, 229, 230, 234, 237,239, 245, 255, 259, 261, 266, 268, 269, 276, 278, 281, 284,285, 296, 297, 299, 301, 304, 305, 306, 313, 317, 320, 323,326, 336, 337, 340, 342, 343, 344, 346, 347, 354, 374: n = A,T,C or G
  misc_feature 379, 387, 389, 400, 408, 422, 428, 437, 441, 448, 451, 456,467, 489, 490, 496, 502, 519, 523, 526, 552, 575, 576, 587,601, 608, 636, 638, 647, 653, 659, 669, 671, 679, 690, 699,724, 732, 735, 742, 749, 765, 768, 780, 790, 798: n = A,T,C or G
aattggagctccccgcggtgggcggcccgaggtacttttttttttttttttttttttnncccnncntttcccggnnaaaaannnttganttcnnnntannnaaanannacgttnttcanngggggaaaaaaaggccncannngggngggngnnnacnatgnnacccnngggnntttnnggaagangggngctcaannacaaanccntnnaannnnggggnnnttttgnnncccnaancnggggcnaaaattgacncccncncggcngnnggacttncnttnggnnaaaaaaagttnnantnttnnnatacaanttanaanttnaangggtaataannggntnnncnngccaaantgaagacataaatacatatnctgtngggcaaancnttttcacccgncctaaganaacatgcccccccncaaaancaatccccnaacntttcccnaancaaangggggagcccnttaatcctgtttttaacatacnngctcantgacgngggtactaaggatagantccnccnccattgggtttgagccataactggantcccaaaaggctttggggtaccnnaccattttttnagggaggagggganaaattgngtgaatttaccccatgccaaagcttaanangggcctcgnctaaancccacnggcgccaatntncaaaatcntgggtttccancctcacctnggaaatgcccccccattgggaggangggggacnttnggaaganggaccanggggggattctggaantanccccatgctttnaacaaagctnaacttttntccttt

SEQ ID NO: 345 - DNA, 422 bp, Homo sapiens
  misc_feature 210, 244, 251, 256, 271, 285, 289, 290, 292, 316, 348, 353,361, 371, 378, 416: n = A,T,C or G
ccgggcaggtacagtggccccccgtgaaagacagaattgtggttttcctggtgtcacgccctcccagtgtgcaaataagggctgctgtttcgacgacaccgttcgtggggtcccctggtgcttctatcctaataccattgacgtccctccagaagaggagtgtgaattttagacacttctgcagtggatctgcctgcatcctgacgcggntgcccgtcccccaagcaccggttgaattaagttnccagganctcgngcttgcgcaacctancaacccgggaactncctnnangaacaacgccttttctgccaagcntgtggcccttcgggctttcaacaaaaccaacnagtantttggacnttggctttcntggaacntatttggaaccttaaccttccataataaattttggggnccctta

SEQ ID NO: 346 - DNA, 483 bp, Homo sapiens
  misc_feature 6, 45, 46, 52, 53, 55, 58, 60, 62, 78, 87, 89, 90, 91, 98,106, 116, 121, 127, 128, 129, 142, 158, 170, 184, 191, 197,199, 200, 202, 206, 211, 212, 219, 224, 225, 228, 234, 236,238, 240, 242, 243, 244, 248, 249, 253, 261, 265, 266: n = A,T,C or G
  misc_feature 269, 270, 272, 283, 285, 301, 302, 308, 314, 334, 335, 339,357, 364, 369, 402, 403, 404, 405, 407, 409, 410: n = A,T,C or G
agggcnaattggagctccccgcggtggcggccgaggtacgcgggnnacaganntnttncnancagtttctacaaggcntgaatcatngnnntaagaanattgcgangggattactnacaanaaattnnngttgaccatctcngcagacactggtgtgnggcgggaaattnacctttgttttttnctagccncggctngnngngctnaatcnncaccttngcccnnggntgctcntncntncnnnccgnnaccnctggaggnaaanngtnncntattctcagcnanttctgcatgctctccnnagcctnctgcanattctaacaaggggggcgcnngatncacaatgcctcttccaancacgagngggtnttcttgggctcaaaatatatttgttggatccannnncngnnatccttttccaacacattcccacctattgtgggaacagatggcattataagaacattgtgtttgatgaaaatc

SEQ ID NO: 347 - DNA, 374 bp, Homo sapiens
  misc_feature 1, 45, 47, 48, 50, 53, 56, 58, 60, 64, 65, 66, 69, 76, 78,82, 89, 90, 101, 113, 117, 123, 143, 159, 162, 166, 168,185, 188, 192, 202, 222, 226, 248, 262, 271, 272, 287, 288,297, 301, 305, 307, 308, 311, 313, 315, 317, 318, 320: n = A,T,C or G
  misc_feature 323, 324, 334, 336: n = A,T,C or G
nattggagctccccgcggtggcggccgcccgggcaggtacggatncnncntgnccnangntggnnnaanggtatcntnctgnttgaacnncaattcagatnataatgaggagnattnggcctnggagaaactaaactgatggncttaatgggctaaatnccnatgntnaatccttatggattttnggngcgntgggattgtntgttgaacttattataaganaaangggcttccaaagtgcgaccacntactgtgttcccgncctgacagnncaatggcctaagctnntttgaaatntatnaaangnncantntntnnantgnngagcaatggntnctttccagacaggaagactgctgctaagtaccctcggc

SEQ ID NO: 348 - DNA, 544 bp, Homo sapiens
  misc_feature 14, 93, 96, 381, 382, 384, 385, 388, 389, 390, 394, 401,402, 413, 417, 421, 423, 428, 432, 434, 436, 437, 440, 441,443, 444, 452, 453, 454, 459, 465, 471, 495, 502, 510, 511,513, 517, 518, 521, 525, 528, 534, 535, 540: n = A,T,C or G
cgaggtacatgtgngccccccgtgaaagacagaattgtggttttcctggtgtcacgccctcccagtgtgcaaataagggctgctgtttcgacnacnccgttcgtggggtcccctggtgcttctatcctaataccatcgacgtccctccagaagaggagtgtgaattttagacacttctgcagggatctgcctgcatcctgacgcggtgccgtccccagcacggtgattagtcccagagctcggctgccacctccaccggacacctcagacacgcttctgcagctgtgcctcggctcacaacacagattgactgctctgactttgactactcaaaattggcctaaaaattaaaagagatcgatattaaaaaaaaaaaaaaannannaannncctngccgggnnaaaccttttanattngggnanccccngggntntnnganntnnaaaaaaannnttttnttcccncccccngggggggggggcaaaaaaaaaaanttttggnccctttanngngggnntantggnccntttgcnnccccngggg

SEQ ID NO: 349 - DNA, 790 bp, Homo sapiens
  misc_feature 28, 40, 63, 64, 65, 66, 67, 68, 77, 84, 89, 90, 93, 99, 100,111, 112, 117, 119, 120, 121, 132, 133, 134, 135, 138, 139,140, 141, 152, 157, 158, 163, 166, 167, 168, 169, 170, 173,178, 186, 188, 193, 196, 199, 201, 207, 208, 212: n = A,T,C or G
  misc_feature 216, 218, 221, 223, 232, 238, 240, 241, 249, 250, 252, 261,263, 264, 271, 275, 276, 279, 281, 284, 286, 287, 291, 293,294, 296, 301, 302, 307, 311, 312, 316, 317, 318, 324, 333,339, 346, 348, 350, 351, 353, 361, 362, 363, 364, 367: n = A,T,C or G
  misc_feature 369, 372, 381, 393, 394, 401, 402, 403, 412, 424, 428, 435,444, 452, 463, 464, 465, 467, 468, 469, 472, 473, 480, 482,488, 496, 500, 510, 513, 514, 516, 518, 520, 526, 528, 533,535, 544, 557, 558, 559, 560, 561, 564, 565, 566, 583: n = A,T,C or G
  misc_feature 585, 586, 610, 612, 614, 618, 631, 633, 639, 645, 662, 666,668, 669, 689, 692, 693, 698, 709, 716, 719, 720, 722, 725,728, 731, 734, 737, 745, 753, 754, 755, 757, 759, 760, 761,762, 763, 764, 765, 766, 767, 768, 769, 770, 771, 772: n = A,T,C or G
  misc_feature 773, 774, 775, 776, 778, 779: n = A,T,C or G
aattggagctccacccgcggtggcggcncgaggtactttnttttttttttttttttttttttnnnnnnccccccccnttttttnaaaannccnttaaannggggggggggnnaaaancnnntttttttgggnnnnaannnnggggggggggnaaaannccccnctnnnnnggnccccnttttacantnggttnccnaangnttgaanntttngggngnttnanaaaaccccntttttntnntttttttnncnaaaaaaatngnngaaaggnccanngcncncancnnccananngngaaanncccgngggnnaaannngccccnaaaatgggnccccantttttcncncnntngggggggnnnnaanantangggcccccntaattttgaaannttttttnnntcccaaaanttcgaggtgagngganttttttnaaaccccancacccccnttttaaaaaannngnnnttnnaaaggcncnacaaanttttggcncccngaggggtccngtnngngntnttcacncnggggncnctttaaaanattttttttgggnnnnnccnnnaaaaacggggttactantnnccccccataacctcaacctttggnantncaantgtgcaatggctngnccttgnaccctnggggtttttgcccctgncccnanngggccctgccctaaaaaccncannttatnccccccccctnttttaanggnncntcnatnaanggnacnttcttttnaaaaaatnnnanannnnnnnnnnnnnnnnnngnnccccccccccc

SEQ ID NO: 350 - DNA, 823 bp, Homo sapiens
  misc_feature 303, 368, 421, 432, 444, 459, 467, 503, 509, 512, 524, 551,586, 589, 628, 636, 663, 664, 689, 694, 697, 712, 714, 718,721, 731, 738, 752, 765, 782: n = A,T,C or G
cgcccgggcaggtacagtggtgtgatctcggctcactgcaacctctgcctcccgggttcgagtgattctcctgcctcagccttcagcttgcactaccacgcccagctaatttttgtattttcagtagagatggagtttcaccatgttggcaaagatggtctctatctcttgaccttgtgatccacccgccttggcctcccaaagtgctaggattacaatattggattttatgttagcaccagcctgtcctttattgatcataccatttacctggactcttttcttcaagaacacaatctaagnaatcctaaaccagttttgacacaaaccattgcctttaacaacccattcatagtgaggggatttantgtagtttcaatgtcaccatccaagatcccaccccagtacctcggccgccccnggcaggtcccngggacaagggcnacccagctctcaaangaactggnccagcttccggatgcctattaaaaacagaaggagcngcttgnggnaacaactagaanccccttccaagccaaaaggaatgggcncttttttcaggaaagccgggaactttttgccaaanttnaaaattttattggaaaaaaccccccggaacctggagganggggtttnagcctaatttcttggcgggttcttaannaggaaaaaaacttgggaccaaaggnttttnggnaaaaccccgcttggnantccnggnaaataaaggnggttttnaaacccctggaacnaaaggcccggganattccccctccaaaaanggaacctgggggaccaaatttcttttggaaggaaaaaaaaa

SEQ ID NO: 351 - DNA, 586 bp, Homo sapiens
  misc_feature 47, 51, 68, 84, 85, 88, 91, 92, 94, 96, 97, 98, 99, 100,104, 106, 108, 109, 110, 111, 113, 114, 119, 120, 121, 125,126, 128, 131, 135, 137, 141, 150, 151, 152, 159, 160, 165,168, 175, 181, 184, 185, 189, 197, 198, 199, 200, 202: n = A,T,C or G
  misc_feature 207, 218, 221, 223, 226, 227, 230, 231, 233, 234, 235, 237,238, 239, 240, 242, 247, 249, 250, 252, 262, 263, 265, 270,271, 274, 276, 288, 289, 290, 291, 292, 298, 301, 303, 304,305, 309, 311, 318, 319, 323, 324, 330, 337, 338, 343: n = A,T,C or G
  misc_feature 344, 348, 349, 356, 361, 363, 369, 372, 383, 390, 392, 394,395, 406, 415, 418, 427, 429, 430, 435, 437, 449, 462, 468,471, 479, 481, 482, 483, 485, 488, 507, 515, 521, 522, 551,558, 566, 572, 573, 574, 575, 586: n = A,T,C or G
ccgggcaggtacttttttttttttttttttttttttttttaaaaaangggnttttttttttccccccnaggggggggggggggnncanttnngntnnnnnggcncntnnnncnnggggnnnaaannanttncccntntttntcctaaaannnaaaaaanncaggngtnccccccncccccnttnntttntaaaaaannnncnttttnaaaaaaggggnttntnttnnttnncnnnannnntnaaaancnncngccctaaaannanttttnngcntngccccctaaaannnnntttttntangnnnaaancnagggccnnggcnnaaaaanaattttnngccannaatnngaaaaancctgntntttttnttnagaggggaaantttcaancncnncttttttaaanaaaaaaagnttngtgggacananntgccntnaaaaaaaaacangatatttatgggnagatanttnaccccatnannncnccnctggggggggttcatgaanacatcccncccccnntaaaaatagaaaaaacccccccctgtcgngaatttnttttaaantttttnnnnccccccccccn

SEQ ID NO: 352 - DNA, 594 bp, Homo sapiens
  misc_feature 41, 63, 111, 114, 115, 116, 117, 118, 126, 127, 128, 132,135, 141, 142, 143, 144, 155, 162, 163, 164, 177, 179, 181,182, 184, 185, 186, 187, 188, 189, 198, 207, 208, 210, 214,224, 231, 233, 238, 241, 246, 251, 253, 256, 263, 267: n = A,T,C or G
  misc_feature 269, 275, 278, 279, 281, 283, 285, 287, 291, 315, 326, 329,330, 333, 334, 335, 336, 337, 343, 351, 352, 359, 369, 371,373, 376, 378, 387, 392, 393, 402, 406, 416, 420, 421, 449,450, 459, 467, 468, 470, 473, 474, 487, 497, 498, 511: n = A,T,C or G
  misc_feature 517, 518, 525, 526, 559, 560, 571, 580, 583: n = A,T,C or G
tggagctccccgcggtggcggccgcccgggcaggtactttntttttttttttttttttttttntaatttttttttttttttttttttttttttttttttttttaaaaaaanacnnnnntttttttnnngacncantttttnnnnaaaaaaaaaanaccctcnnnttttttttttaangncnncnnnnnntaaaaaaanttttttttnntncccngggggggggngccaacncnttttnaanaaatncccangnggngggggancccnanacaatnatnnangnancncccnaaaaaatttaaaaaaacccccccntttttggggangannccnnnnntttttntaaaaaanncaccggncaccccaaanangnttntntaaaaaaanccccnnttttttcanaaangggggggggngacnnaaaaaaaaaaaaatttttttttttttgnngggggatcntttttccnngnttnnaaaaaaaaaaaancccccccccnncgggaaaaaattnaaaaannttttttnncccccccccccccgggggggggccccccccccnnttttttttttntttttaaanaanaaaaaaaaccc

SEQ ID NO: 353 - DNA, 267 bp, Homo sapiens
  misc_feature 4, 44, 87, 122, 175, 188, 199, 206: n = A,T,C or G
cgangtacgagacctgcttctatctcctgaagaaaactgtggcnttctggaatgggaagatagggaacaaggaatttttcgggtggntaaatcggaagccctggcaaagatgtggggacaanggaagaaaaatgacagaatgacatatgaaaagttgagcagagccctgaggtangttaatagcatanaatactatganccttcangaagagttatatacaatggctggctgtagaaaattacactgtttttgcaggttttttactt

SEQ ID NO: 354 - DNA, 312 bp, Homo sapiens
  misc_feature 4, 19, 42, 69, 103, 106, 124, 217, 233, 253, 292: n = A,T,C or G
tgtntccacacctgtcctnttggagtttggatggcaaagacntgcgaggtggttttgggcacacctaangtctgtttcaggggtcctgaatgaggtgattgcnacnactcaaagactaagtttntaagatcccaggcatggagtaaagcaattctatacacaggatctcaatcctagtcacaaagacttcttaatgatacatgggctcaaagacatnggttcccctgaacacntcagcttggattcatactgnccccatattttccagtgtgccatgtagttatcctttatnaccctcgtaaccatgcccat

SEQ ID NO: 355 - DNA, 676 bp, Homo sapiens
  misc_feature 2, 4, 7, 10, 15, 19, 20, 23, 26, 27, 28, 32, 33, 34, 36,40, 43, 51, 59, 63, 65, 70, 73, 78, 79, 81, 88, 92, 93,102, 104, 106, 112, 118, 130, 157, 158, 186, 220, 225, 226,229, 230, 232, 236, 238, 240, 244, 245, 254, 263, 266, 267: n = A,T,C or G
  misc_feature 275, 287, 302, 320, 357, 397, 410, 440, 457, 470, 505, 515,520, 527, 532, 543, 554, 563, 577, 594, 615, 619, 623, 624,628, 635, 638, 639, 649, 656: n = A,T,C or G
gntntcnggnttccntctnnctnagnnnaaannncncttnatnctgttgangcaagagngacngnacatncanccctnncnacccagnctgnntttcactgnanancaaggntgaggnagcttcagggcnacactgcgagtttctatgcatgaaatnntcctagcattttgcgttctcataactanaatatggcttgtgttgcaagaccaatgatactgngaacnntanntncccngncngccnntctagaacnagtgcgatnccnngggctgcntgaattgagatntcaatcttatccttnccgtacgacctgggaggnggggcccggctacccagaattttggttcccttttacncgaagggtctaattgcgctacttaggccgtaaatcaatgnaacatgagcatgnctctcctggtggcgaaaaattggagtatanccgtatcatcaaatatntcaccacgaactntaccgcatcaccttggaagccatttatagcagttnaaagcactancgggntgccctnaactngaagttggaancttaaaacttnaccaatttnaatttggccgtttnggggcattaaacccgcnccccccccccctaccccccgngaanaaannctgnccccccnttnncccccctttnattttanctcccccccccccccccccc

SEQ ID NO: 356 - DNA, 633 bp, Homo sapiens
  misc_feature 353, 389, 408, 417, 434, 496, 498, 502, 511, 522, 542, 547,557, 558, 574, 576, 578, 589, 592, 598, 625: n = A,T,C or G
aggtactcatggtctgccaaccctggcttcacttggcacggttgatttaggtgctcatgtcaccaaacagcagagccatcctgagcagaattcagtagactattgccaacaactgactgtgtctcaggggccaagccctgagctctgtgatcaagctatagccttttctgatcctttgtcatacttcacagatttatcatttagtgctgcattgaaagaggaacaaagattggatggcatgctattggatgacacaatctctccatttggaacagatcctctgctatctgccacttcccctgcagtttccaaagaaagcagtaggagaagtaagctttagctcaaatgatggngatgaattattagaaataaacagaccccaatttatnaactgggaaagcaattttntgcttgggngctatgcaaattatgcntctggggtttcaatattgtttgcttttggctttatttttttttttttttaaaagggaatgtngntggnttcattggnaaaaaaacctngttttggaaagccccacccnaaagnaattttcccnngggaggaaaaaaaccntnangtgggttaaanggnaaattnttttggggggggccaaaaaaaaaaaanggggggtt

SEQ ID NO: 357 - DNA, 147 bp, Homo sapiens
  misc_feature 15, 22, 26, 30, 33, 37, 49, 55, 74, 77, 80, 81, 94, 95, 99,119, 129: n = A,T,C or G
cgcgtaatacgactnactatanggtntaanggngaantgcagctccacngcggcngcggcccgcccgggcaggnacncgnnttcgtggcgatanngganagcccggtgaaaaggggccnacaggtcttnctggcttaaagggacaca

SEQ ID NO: 358 - DNA, 493 bp, Homo sapiens
  misc_feature 66, 104, 116, 177, 198, 202, 219, 243, 257, 277, 319, 342,369, 378, 392, 396, 399, 405, 417, 434, 436, 448, 453, 454,464, 472, 481: n = A,T,C or G
ctccaccgcggtggcggcccgcccgggcaggtaccgcgggaagggctgctgtttcgacgacaccgntcgtggggtcccctggtgcttctatcctaataccatcnacgtccctccanaagaggagtgtgaattttacacacttctgcagggatctgcctgcatcctgacgcggtgccntccccagcacggtgattagtnccanagctcggctgccacctncaccggacacctcatacacgcttntgcagctgtgcctnggctcacaacacagcattgnctgctctgactttggactactccaaaaattggccttaaaaanttaaaaggagatccgatacttgnaaagaaatactaataaacaaaacaggnttccctttngcgcgctcttatanactnggngggaanccccccggggcnttggcaggggaaatttncnaattattcagangcttnnattctaattncccgtccncaccttccnaagggggggggg

SEQ ID NO: 359 - DNA, 549 bp, Homo sapiens
  misc_feature 78, 110, 118, 174, 184, 200, 206, 209, 211, 213, 221, 267,316, 347, 363, 377, 381, 385, 391, 399, 407, 434, 436, 450,465, 473, 483, 504, 531: n = A,T,C or G
atagctcctaatttaattattataacaaaaatttactgagcatctactatgggcaaacatgggaaatctaaacatgcntgagtcccagtcctagctcaggatgactttanaacctaanggaaaacataaacatatacagaaggaacgtcaacccaacatcagagtctttttaanggttatatanaacatccttcaagacnccacanaanancncgcctganggggtgcctgccacaaaggatgtgaggggtaagcagggcgggcagnatttcccaatcccgctgatctccacaaccataggagggggcagcttccnttcccccattccatatcagtctattcatacnttacaagacaaaagtntgattccttccaanaaanagtntgccanggaccacncacatacnggattttacagaatctttgaaatcatntnttttcaacattgtnatcgttcagataaanaaaatganatcaggcctncactggcactgaatcaaagtntttggggagataggccccaaaaatttntttaaaaaaataaaaatg

SEQ ID NO: 360 - DNA, 283 bp, Homo sapiens
aggtacgcgggggaggaactgctcagttaggacccagacggaaccatggaagccccagcgcagcttctcttcctcctgctactctggctcccagtttcagatgccagtggagaaatagtgatggcgcagtctccagccaccctgtctgtgtctccaggagaaagagccaccctctcctgcagggccagccagagtgttagcggcaacttagcctggtatcaacataaacctggccaggctcccaggctcctcatctatggtgcatccaccagggccactggta

SEQ ID NO: 361 - DNA, 288 bp, Homo sapiens
  misc_feature 263, 273: n = A,T,C or G
agcagtataatcactggccttcttttggccaggggaccaagctggagatcaaacgaactgtggctgcaccatctgtcttcatcttcccgccatctgatgagcaagttgaaatctggaactgcctctgttgtgtgcctgctgaaataacttctattcccaagagagggccaaagttacctgcccggggccggccgctcttagaactaagtgggatcccccgggcctgcaggaatttcgatattcaaagctttatcgatacccgntcgacctcgnaggggggggccccgg

SEQ ID NO: 362 - DNA, 516 bp, Homo sapiens
  misc_feature 401, 433, 445, 446, 468, 485, 509: n = A,T,C or G
ggccgcccgggcaggtacaatgcaaaagattcaaagccccttccactctcttccagtgtgcaagatgaaagaatgcatatgctattgcttcactgtctcctctcttcaggatatgttctgggggtaggattaagcttttcatttctagtaggtattttggcacatgaggattgaattccacagctctatgaatgggcctctactggcattcatctcttgctggtgctcaagccccccgccgagaatgccagccctcaaggaagaagaaattttgtcaagaaaaacagctctttggcttttggagccaaaagccagcctggtggtaagcaatatttggttggcttgaccttttgggtaaagccttaatatcaatcaataccttttggcttaaagaacttggncctggaaccattcaagccattattgcctttgntaagtttcccannaaaggggcctttcttaaaaaanggtttttcaattgggantatttggaaccatacctcagaaangggggga

SEQ ID NO: 363 - DNA, 565 bp, Homo sapiens
  misc_feature 4, 13, 32, 68, 77, 81, 83, 88, 89, 105, 106, 108, 123, 137,138, 156, 160, 171, 176, 178, 182, 184, 189, 197, 202, 208,210, 213, 214, 216, 256, 267, 273, 275, 277, 279, 285, 305,313, 314, 321, 338, 345, 367, 379, 386, 395, 406, 419: n = A,T,C or G
  misc_feature 430, 433, 435, 436, 439, 440, 449, 471, 475, 481, 487, 492,498, 500, 503, 504, 508, 514, 525, 533, 539, 543, 544: n = A,T,C or G
aggnacttttttnttttttttttttttttttnggaattatcttgatttcctttcactaccaagaaaanaaatacttnaatncnttagnnaatatttttggggtannanaaaatttttaagacngtagttatgagtannatgtgtattcacaacagnaatnttccccctggnagagngngctnanaatanacctgctntgggntaaaananctnnanggctttggacattgcctttacattcaaaaatggagttcantgtcatggccngaaaanangnantccccnagggaaagccagggaacccncccgcttnnaaaagcnttgggcctttagggaanaaaagcnagaagaaggcttggggttgccntttccccccacnctggatntcccccaancctattttggntttcttgttgaangtttccaaaanccntnnccnnaaaaacttnttgggggccaaaagttcacctnttantacaangcttgnggaanccccantnttnntccnccccgntccgtttatgnagcccagncaattnaatnngggaccttcccttggggcttt

SEQ ID NO: 364 - DNA, 189 bp, Homo sapiens
  misc_feature 3, 10, 13, 15, 22, 25, 26, 50, 55, 56, 59, 81, 99, 130: n = A,T,C or G
tancgtgggngcngncgaagtnctnngttaactgcctttatatcatgctnaagtnnaangctaatttgagtttgaaatacngtggctaatagagctaanaaaacacattcatcatcattctctggtattntctaatgtcttctggtagctcccactcatccccagagtagccaaggttgaacttgaacc

SEQ ID NO: 365 - DNA, 632 bp, Homo sapiens
  misc_feature 227, 235, 400, 402, 404, 409, 436, 456, 457, 473, 509, 525,549, 550, 555, 559, 564, 567, 581, 593, 600, 608, 609, 616,617, 627: n = A,T,C or G
aggtacaaatttggaaaaaaatgcacacgggtggcaggaagacaagctatgatctgctccaggcatcaagctcattttatggatttctgtcttttaaaacaatcagattgcaatagacgttcgaaaggcttcattttcttctcttttttttaacctgcaaacatgctgataaaatttcttcacatctcagcttacatttggattcagagttgttgtctacggagggngagagcanaaactcttaagaaatcctttcttctccctaaggggatgaggggatgatcttttgtggtgtcttgatcaaactttattttcctagagttgtggaatgaccaacagcccatgccattgatgctgatcagagaaaaaactattcaatttctgccatttagagacacantncnaatgnctcccattccccaaagggttccaaaangtttttcaaaataaacctgnnggcagcttcaccaaangttgggggggaaaaggcattgaattaggtttggcanggttatggtaaggganaaggggtgaagaatttaaaagaannttacntacnttttnaantttttaaaatttanttttaaaggtcntaaaaantcccattnngaaaaannttttcccccnttttt

SEQ ID NO: 366 - DNA, 138 bp, Homo sapiens
  misc_feature 25, 27, 31, 33, 40, 42, 43, 46, 63, 102, 130: n = A,T,C or G
gcccgcccgggcaggtactttcatngngttngngatgttntnntgngacagtgtctcactagngcagtggccgctatcttggctcactgcaacctccttctnttgggttcaagtgatcctcatgcttcanagatgggg

SEQ ID NO: 367 - DNA, 46 bp, Homo sapiens
  misc_feature 2, 8, 26, 30: n = A,T,C or G
cnggccangtacgcagggggccccgncggncatcgttgagccccgc

SEQ ID NO: 368 - DNA, 41 bp, Homo sapiens
  misc_feature 7: n = A,T,C or G
acgactnctatagggcgaattggagctccccgcggtggcgg

SEQ ID NO: 369 - DNA, 147 bp, Homo sapiens
  misc_feature 3, 67, 74, 76, 86, 90, 99, 103, 111, 130, 145: n = A,T,C or G
ctncttagggcgaattggagctccccgcggtggcggccgcccgggcaggtacagaacttaagacacnactattngntgagatgaanaaangcatatatnggangccttcanaatgaaatggtcagagggngagtttacacagatnga

SEQ ID NO: 370 - DNA, 33 bp, Homo sapiens
  misc_feature 4, 15, 22: n = A,T,C or G
gctnttataaatgantaaatangctaagaatag

SEQ ID NO: 371 - DNA, 60 bp, Homo sapiens
ccgggcaggtactctgcgttgttaccactgcttacttttttttttttttttttttttttt

SEQ ID NO: 372 - DNA, 94 bp, Homo sapiens
  misc_feature 10, 51: n = A,T,C or G
agggcgaatnggagctccccgcggtggcggccgaggtacccgaatttaatncgagtggtcatcacagtccccgaggtgatgatgctggaggcgt

SEQ ID NO: 373 - DNA, 38 bp, Homo sapiens
  misc_feature 34: n = A,T,C or G
ggagctccccgcggtggcggcccgaggtactttntttt

SEQ ID NO: 374 - DNA, 51 bp, Homo sapiens
ccgccgtaataccgactcactattagggccgaattggagctccaccgcggt

SEQ ID NO: 375 - DNA, 47 bp, Homo sapiens
  misc_feature 20, 22: n = A,T,C or G
ctccccgcggtggcggccgncnggccaggtacttttttttttttttt

SEQ ID NO: 376 - DNA, 80 bp, Homo sapiens
aattggagctccccgcggtggcggccgcccgggcaggtactccagcctgggcgacagaccaaggctctgtctcaaaaaaa

SEQ ID NO: 377 - DNA, 231 bp, Homo sapiens
  misc_feature 29, 104, 116, 149, 154, 161, 175: n = A,T,C or G
aattggagctccccgcggtggcggccgangtgagaggatggcttgagtccaggaggtcaaagctacagtgaaccatgtttgtgtggagtgccactgcactccancccaggtgacanagcaagaccgtgtcataaaaaataaaccacacncaaanagagaangatctttatggatnaaaaagataataataatgtgtatttactgaatgccaattatctatccaacctggtg

SEQ ID NO: 378 - DNA, 25 bp, Homo sapiens
  misc_feature 6: n = A,T,C or G
agggcnaattggagctccaccgcgg

SEQ ID NO: 379 - DNA, 371 bp, Homo sapiens
  misc_feature 343: n = A,T,C or G
ccgcggtggcggccgaggtactttttttttttttttttttttttttgagataagtctcgctctgtcacccaggctggagtgcagtggcatgatctcggctcactgcaagctccgcctcctgggttcatgccattctcctgcctcacctcggagtagctgggactacaggcgtccgccaccgcgcctggctcattttttttgtatttttagtagagacggggtttcacggtgttggccaggatggtctcgatctcctgaccttgtgatccacccgcctcgaccttcaaagtgctgggattacaggcgtgagccaccgcgcccagccgagttcagactatttggngggcaacagcaagacatggttttttagg

SEQ ID NO: 380 - DNA, 343 bp, Homo sapiens
  misc_feature 151: n = A,T,C or G
ccgcggtggcggccgcccgggcaggtacttttttttttttttttttttttggagatggagtcttgcagtgttgcccaggctggagtgcagtggcacgatctcagctcactgcaagctccacctcccgggctcaagcgattctcctgctcancctcctgagtagctgggattacaggcgtgcgccaccacgcccagctcatttttgtatttttagtagagaccgggtttcgccatgttggtcaggctggtctcgaactcctgacctcgtgatccgcctgcctcggccccgcaaagtgctgggattacagacgtgagccaccacgcccagctggaagttaacttt

SEQ ID NO: 381 - DNA, 54 bp, Homo sapiens
aattggagctccccgcggtggcggccgcccgggcaggtactttttttttttttt

SEQ ID NO: 382 - DNA, 41 bp, Homo sapiens
atagggcgaattggagctccccgcggtggcggccgcccggg

SEQ ID NO: 383 - DNA, 40 bp, Homo sapiens
  misc_feature 24, 27, 28: n = A,T,C or G
ggagctccccgcggtggcggccgnccnngcaggtactttt

SEQ ID NO: 384 - DNA, 85 bp, Homo sapiens
gagctccacccgcggtgggcggccgcccgggcaggtacgcggggcttgaacccggagtcaacagagactccatctcaaaaaaaaa

SEQ ID NO: 385 - DNA, 81 bp, Homo sapiens
  misc_feature 7, 11, 26, 41: n = A,T,C or G
ccgggcnggtnctcagactaccacanatattcccttacggnccaggtctctcatgttatgctgttttttccaacctgagct

SEQ ID NO: 386 - DNA, 30 bp, Homo sapiens
  misc_feature 17, 18, 21, 27, 28: n = A,T,C or G
cagaatcctggccaggnnccnaggctnntc

SEQ ID NO: 387 - DNA, 141 bp, Homo sapiens
ggagctccccgcggtggcggcccgcccgggcaggtacttttttttttttttttttttttttccttttttttttttttttttttttttttttttttttttttttttttttttttcctttttttttttttttttttttttttt

SEQ ID NO: 388 - DNA, 69 bp, Homo sapiens
  misc_feature 46: n = A,T,C or G
tatagggcgaattggagctccccgcggtggcggccgaggtactttntttttttttttttttttttcctt

SEQ ID NO: 389 - DNA, 94 bp, Homo sapiens
  misc_feature 29, 31, 45, 58, 62, 67, 68, 77, 81: n = A,T,C or G
tgactttgatgtgtgacaacaggcaccancnatcgccaactaganaagctcaccaganctcngatgnnggaagcttntatnggggcctcagcat

SEQ ID NO: 390 - DNA, 343 bp, Homo sapiens
  misc_feature 94, 130, 186, 216, 291, 300, 316: n = A,T,C or G
ccgggcaggtacagtggtgtgatctcaactcactgcaaccctctacctcctgggttcaagtgattctcctgcctcagcctcctgagcagctcanattataggcacccgccaacatgcccggctaattttngtatttttagtagagacggggtttcaccatgttggccaggctggtctcgaactctngacctcaggtgatccacccgccccagcctnccaaagtgctgggattacaggcatgagccaccgcgcctggccaaaatgaagcatttttttaaaccaaactgtttntttgctagngtgatctagccatggnattcattccactgtgctctatttcttt

SEQ ID NO: 391 - DNA, 84 bp, Homo sapiens
  misc_feature 32, 33, 35, 39, 44, 47, 52, 62, 67: n = A,T,C or G
aagcctcaagagagcagacacgtgctgaaaanntnctgngcagnccngattnccctaaactntggtnagtaacaggtctgcctg

SEQ ID NO: 392 - DNA, 65 bp, Homo sapiens
cgcccgggcagggtacttttttttttttttttttttttttttttttttttttttttttttttttt

SEQ ID NO: 393 - DNA, 87 bp, Homo sapiens
  misc_feature 29, 30, 38, 40, 41, 43, 46, 53, 59: n = A,T,C or G
cgcggtggcggcccgaggtactcgagccnnatggagtngnncngcncatcgancagacncacggacgtgtcccaggaggagacaagc

SEQ ID NO: 394 - DNA, 201 bp, Homo sapiens
  misc_feature 46, 47, 59, 65, 66, 69, 70, 72, 80, 82, 83, 84, 89, 94, 95,96, 97, 98, 99, 100, 101, 102, 105, 106, 111, 112, 114,115, 117, 118, 125, 126, 132, 137, 140, 141, 143, 144, 145,146, 158, 161, 163, 164, 166, 174, 177, 183, 184, 185: n = A,T,C or G
  misc_feature 188: n = A,T,C or G
cgcccgggcaggtacttttttttttttttttttttttttaaaaaannattttttttttngccccnnggnngnaaaaaaanannnaattntaaannnnnnnnnccnnccccnntnngnntaaaaannattttntgccntanncnnnnaaaggggggggnttntnngncccccccnccncccccnnnttnttttttttttttt

SEQ ID NO: 395 - DNA, 397 bp, Homo sapiens
  misc_feature 245, 337: n = A,T,C or G
gctgattggagctccccgcggtggcggccgaggtacaagcagtaattgattcactggccttggactacttgcaggtcagcttgtctcacataacaggttggtatatgtataactatcacataattatgcattttagtaaaaataattgtttagaactggcttcgggcagttgtgacctctaactgtaatttccttgcttcttctgtatgtttccacctcttgtgctgtgcgcctagccaaatcanagtgctcttgataaaaattcttctcaaatttaggcagctcatcaagattccacttctttttaactaatttctccccagggtttccaaacttntttccagataagggccctgccctacttcctccaaatcgaggtgcaccaaaccctcggtcc

SEQ ID NO: 396 - DNA, 372 bp, Homo sapiens
  misc_feature 65, 95, 151, 156, 170, 215, 222, 249, 259, 275, 278, 301,320: n = A,T,C or G
cgcccgggcaggtacgccgggtggcgtcacgccctcccagtgtgcaaataaggcttgttgtttcnacaaacccgttcgtgggtcccttgtgcttntatctaatacaatcgacttccttccagaaaaaggaagtgtgaaatttaaaaccttnttganggaatttgcttcantcttgacccggtgcccgccccaacacgggtgaataattccaagangctcggnttgcaacttcaaccggaacaccttaanaacacgcttnttcagcttgtgccttnggnttaaaacaaaaaaattgacttgnttctgactttgactacttnaaaattggcctaaaaattaaaaagaagaatcgatcccaaaaaaaaaaaaaaa

SEQ ID NO: 397 - DNA, 134 bp, Homo sapiens
ccgggcaggtactactgctgagctgactgtcaaaccacaagatgcagtccttcccactcttcctctcctttccaaaggcagaggagcctcatcccatagccgccaccagccctagtatgaggagtacctcggcg

SEQ ID NO: 398 - DNA, 475 bp, Homo sapiens
aggtaccagctgtaaccaatacgattctggggcaggttgtgggcgagtagaagaacctccttcccctctgcgacattgaatggcgtggattcaatagtgagcttggcagtggtgggtgggttccagaaggttagaagtgaggctgtgagcaggacctccttccaggggacatgcaatctgcagggaggggctgaggggggtcccatggtctctgctgtcttctctgtccgcctctttgtagaggagcttgagctccaggaatgctctggtcagggctgctgtgactgttggccctgctgtccttcctccttctgtccccgcgtacctgcccgggcggccgctcgagggtctttgtctttcttggcccgactttccagcgtccttcttcttcttgtcgtccttaggcggcattgcgaagctcggagaatagctgcagacaccgcagcctcgtcaagatgtcggacaaaaaaaaaaa

SEQ ID NO: 399 - DNA, 377 bp, Homo sapiens
  misc_feature 98, 121, 143, 229, 237, 319, 323, 369: n = A,T,C or G
tggagctccacccgcggtggcggccgttaaacatgtgtcactgggcaggcggtgcctctaatactggtgatgctagaggtgatgtttttggtaaacangcgggggtaagatttgccgattncctttactttttttaacctttnctttatgaaccatccctgtgttggggtgaaagtgagggtaaataatgacttggtgggtgaattggaaaaattgggctggtaaatgncaagtcantggtttaatctgaccccagcttatgccggaggaaaaaatggtttcaatgttacttatccaacattaattcttctattagggngaanagaattggtcccaattgggtggtgaaggaggtcaattatatggttngggaattt

SEQ ID NO: 400 - DNA, 367 bp, Homo sapiens
aggtacaacgcagagcaggtcctgagttgggagccagtggccctgagcaatagcacgaggcctgttgtctaccaagtgcagtttaaatacaccgacagtaaatggttcacggccgaggtacttgttgttgctttgtttggagggtgtggtgggctccattcccgccttgacgggggcttgctatcttgccttccaggccactgtcacggctcccgggtagaagtcacttatgagacacaccagtgtggccttgttggcttgaactcctcagaggagggcgggaacaagagtgaccgagggggcaccttgggctgacctaggacggtcaagcttggtcccttccgccgaacacccaattggtgtcggc

SEQ ID NO: 401 - DNA, 169 bp, Homo sapiens
aggtacagcaaaaacccacctgtgtaaacacacacagcaaagtgatgtaagaagtttccatataaagggctgcagtatgggagaggtaatgtgcaggctggttgcggttgtaggggcccaccttactgaacttttccatgatatgggacctgcccggccgggccgtcta

SEQ ID NO: 402 - DNA, 459 bp, Homo sapiens
  misc_feature 336, 402, 411: n = A,T,C or G
gagctccccgcggtggcggccgaggtacaccaattgaggagagacacatgggtgggaaattgcaataaaaagacggcccatagcaggctgcattcccatggctggccagaggaggaacgctttgtgttctcatcggagctgcatgggaagtctgcatacagcaaagtgacctgcatgcctcaccttatggaaaggatggtggctctggcctcctgtggctggccttggtctcctgcattctgacccaggcatctgcagtgcagcgaggttatggaaaccccattgaagccagttcgtatgggctggacctggactgcggagctcctggcaccccanaggctcatgtctgttttgacccctgtcagaattacaccctcctggatgaacccttccgaagcacanagaactcancagggtcccaggggtgcgataaaaacatgagcggctggtacctgcccg

SEQ ID NO: 403 - DNA, 397 bp, Homo sapiens
  misc_feature 147, 334, 397: n = A,T,C or G
ggaccgagggtttggtgcacctcgatttggaggaagtagggcaggcccttatctggaaagaagtttggaaaccctggggagaaattagttaaaaagaagtggaatcttgatgaacctgcctaaatttgagaagaattttttatcaanagcaccctgatttgctaggcgcacagcacaagaggtgggaaacatacagaagaagcagggaattcagttagaaggtcacaactgcccgaaacccagttctaacaattattttactaaaatgcataattatgtgatagttatacatatccaacctgttatgtgagacaagctgacctgcaaagtagtncaaggccagtgaatcaattactgcttgtacctgccccgggcggccgctctaaactagtggatn

SEQ ID NO: 404 - DNA, 633 bp, Homo sapiens
  misc_feature 31, 54, 56, 76, 79, 83, 85, 86, 92, 93, 94, 106, 119, 127,137, 138, 153, 174, 187, 202, 210, 224, 234, 247, 249, 254,263, 266, 274, 296, 300, 311, 328, 365, 401, 403, 407, 416,425, 459, 462, 472, 475, 517, 533, 544, 546, 552, 574: n = A,T,C or G
  misc_feature 605, 609, 610, 612, 620: n = A,T,C or G
aggtacacactgaaaccactgtcagattaanaaactaccacaacttgtctcagntnttcaaacaatgaatcaagtnccntggngnnggctgnnnattaatcctgtnttggcactgctgntggctatnaaactcaccnncaagggtaaacgatnaaattgaaccacctggtaggngttatattaacanatgatacttttattnttggaaantccaagtttgcttncttggtctgntgcaagggcaaangnggatnagaaaccangtngcaaagcntgctctggagcattgtcatttnccantttaataacangtacctgcccgggcggncgcccgggcaggtacttcactggaaatatgggcgccnaggtggccttcaactggatcattgttcacatggaananccanattttgctnaacccactnaccatgcctggttatggaagggcatcttctgctngancctctatttntgntgcttcttggactgaataaccaacctccaaaaaaaaatctanctatcatcacctccantggaatttcancnaaatcnagctatttcaaagcactaccancaacaaataataacctacaaaaaaacacttncatnngnatctttanccacccctaaatt

SEQ ID NO: 405 - DNA, 134 bp, Homo sapiens
agctccaccgcggtggcggcccgaggtacgcggggggcgccattttgtctcggcagcggtggcccgtagctccatcgcattttatgtttctggcgagaagggaacggagttttcatcaggtagattggttttgt

SEQ ID NO: 406 - DNA, 298 bp, Homo sapiens
  misc_feature 5, 19: n = A,T,C or G
gctcnccgcggtggcggcncgaggtacagcatttcctggaggatctctggagcgatatagtctggcgtgccacagaatgtggccgtggtgacaccattgcaaatcccctccttgcacattccgaagtctgccagtttacagtgaccctcgtggtccaacaggacattgtccagtttcagatctctcatactcagcctataccccatcctccactctagcacccatctctacccatcagagtcagaatgaacacccataggggaggtggccactgtgtgcccccccgcgtacctgcccg

SEQ ID NO: 407 - DNA, 99 bp, Homo sapiens
aggtaccaggatgtccagtgcgaccatcttttccagcagggccagaaggaccagcagggcccctaggaccagcaggacccacggagccaggagcacctt

SEQ ID NO: 408 - DNA, 191 bp, Homo sapiens
gggctctcccttacccgcgtacctgcccgggcggccgaggtacacgtctctgtctgggcctcggccagggtgccgagggccagcatggacaccaggaccagggcgcagatcaccttgttctccatggtggccattgcctcctctctgctccaaaggcgaccccgagtcagggatccccgcgtacctgcccg

SEQ ID NO: 409 - DNA, 254 bp, Homo sapiens
  misc_feature 1: n = A,T,C or G
nattggagctccccgcggtggcggccgcccgggcaggtactgtccaactggatgctgccctggtggctgaaggcacacttcatgatgctgtccagggtcatcagggagacatgttgaaagagctccaggcgtgagttttgggcaatgtgttcctcccatttgttcagcatcatccgaacactctcagacatcatggtgatgaatattttcagaatgctgatgttgaagccaggtttcacaatctggcggtacct

SEQ ID NO: 410 - DNA, 344 bp, Homo sapiens
aggtacaagcagtaattgattcactggccttggactacttgcaggtcagcttgtctcacataacaggttggtatatgtataactatcacataattatgcattttagtaaaaataattgtttagaactggcttcgggcagttgtgacctctaactgtaatttccttgcttcttctgtatgtttccaccccttgtgctgtgcgcctagccaaatcagggtgctcttgataaaaattcttctcaaatttaggcagctcatcaagattccacttctttttaactaatttctccccagggtttccaaacttctttccagataagggccctgccctacttcctccaaatc

SEQ ID NO: 411 - DNA, 338 bp, Homo sapiens
aggtacaagcagtaattgattcactggccttggactacttgcaggtcagcttgtctcacataacaggttggtatatgtataactatcacataattatgcattttagtaaaaataattgtttagaactggcttcgggcagttgtgacctctaactgtaatttccttgcttcttctgtatgtttccacctcttgtgctgtgcgcctagccaaatcagggtgctcttgataaaaattcttctcaaatttaggcagctcatcaagattccacttctttttaactaatttctccccagggtttccaaacttctttccagataagggccctgccctacttcctc

SEQ ID NO: 412 - DNA, 350 bp, Homo sapiens
ggaccgagggtttggtgcacctcgatttggaggaagtagggcagggcccttatctggaaagaagtttggaaaccctggggagaaattagttaaaaagaagtggaatcttgatgagctgcctaaatttgagaagaatttttatcaagagcaccctgatttggctaggcgcacagcacaagaggtggaaacatacagaagaagcaaggaaattacagttagaggtcacaactgcccgaagccagttctaaacaattatttttactaaaatgcataattatgtgatagttatacatataccaacctgttatgtgagacaagctgacctgcaagtagtccaaggccagtgaatc

SEQ ID NO: 413 - DNA, 341 bp, Homo sapiens
aggtactggcaaaaaaagatgctcggtggttccagcagaagccaggccaggcccctgtgttagtgatgtataaagacagcgagcggccctcagggatctctgagcgattctccgactccagttcacggaccacagtcaccttgaccatcagtggggcccacgttgaggatgaggctgactattactgttactgtgcggccgcggtctcggtcactcgaataacccgacatggcgtcaatggttgcggttggcggggaacgaagtatatagaaaagcgtgcgacaagtcgctggaaatggcctcgatgacggcgaagccttgcgggggcggcagcggaggaa

SEQ ID NO: 414 - DNA, 258 bp, Homo sapiens
aggtacagcatttcctggaggatctctggagcgatatagtctggcgtgccacagaatgtggccgtggtgacaccattgcaaatcccctccttgcacattccgaagtctgccagtttacagtgaccctcgtggtccaacaggacattgtccagtttcagatctctcatactcagcctataccccatcctccactctagcacccatctctacccatcagagtcagaatgaacacccataggggaggtggccactgtgtgc

SEQ ID NO: 415 - DNA, 436 bp, Homo sapiens
ccgcggtggcggcccgaggtactggcaaaaaaatatgctcggtggttccagcagaagccaggccaggcccctgtactggtgatttataaagacaatgagcggccctcagggatccctgagcgattctccggctccagctcacggaccacagtcaccttgaccatcagcggggcccacgttgaagatgaggctgactattactgttactctgaggctgacaacaatagggtgttcggcggggggaccaagctgaccgtcctaggtcaagcccaaggctgccccctcggtcactctgttcccgccctcctctgaggagcttcaagccaacaaggccacactggtgtgtctcataagtgacttctacccgggagccgtgacagtggcctggaaggcagatagcaaccccgtcaaggcgggagtggagaccaccacaccc

SEQ ID NO: 416 - DNA, 473 bp, Homo sapiens
acttagggcgaattggagctccccgcggtggcggccgaggtactaccccttccccaaccccagggaatgcagctcctgactccaaaagagacccttccttcctcttggggagaggagggagaagagtaaagaggactttgtcttgcattgaagtcctctttgatgagtggggattcctagctcccagaaaccatttttagaaacaccctgggccagaagggaacctgctgccatgaaggaaaggacccagtccttgcggaatacgtcacctgctgactaaagatcccttgggccttgaataaccagcagcaatatccaagtagtataccatgggccttgggtgaaactctgagactttctggctccaggtgaaacccagcatattgccagctgtggtggctatagtgagagacttcttctgcttgagaaaagctgaaggaaaaataaagcagtatttgccttgtacctgcccg

SEQ ID NO: 417 - DNA, 145 bp, Homo sapiens
  misc_feature 24, 113, 121: n = A,T,C or G
ctacttagggcgaattggagctcnccgcggtggcggccgcagaaggtcccggcagcagcaggaagaagacggaccccgcgatgagggcggcggcaaggagcaccttcatgttnggttcggnaaggcgcagcatccccgcgtacct

SEQ ID NO: 418 - DNA, 337 bp, Homo sapiens
  misc_feature 309: n = A,T,C or G
aggtacacaaaccgtatgttaagtagcgcagccagcagctcaccacagggaaaaacagcatctgcaaaaacgatgtcaaatcttgactcttgtagtttttttcataactttcttatttgaaactacatctttacagaagtttctaaatatgtcatataattcccacacgagcggccgcccgggcaggtacttgttgttgctttgtttggagggtgtggtggtctccactcccgccttgacggggctactatctgccttccaggccactgtcacggctcccgggtagaagtcacttatgagacacaccantgtggccttgttggcttgaagctcctca

SEQ ID NO: 419 - DNA, 571 bp, Homo sapiens
  misc_feature 542: n = A,T,C or G
cgagatactgtccaactggatgctgccctggtggctgaaggcacacttcatgatgctgtccagggtcatcagggagacatgttgaaagagctccagacgtgagttttgggcaatgtgttcctcccatttgttcagcatcatccgaacactctcagacatcatggtgatgaatattttcagaatgctgatgttgaagccaggtttcacaatctggcggtgctttttccatttagaaccatccagggtcacaagtcctcgaccaacccaggattcaaggattttgtggctaacagcacttttgggatcttgtcttttcaggagaatcttggcatagtctgggtcatggacactgaagaacatcgtaaagggtccaacccacaagggaacagcacatgggtatttttccatcagcttatgatacacctcaaactcctttactgggtaaaactccttgtggccatagaaccagtgggcagggggtgcaggaaacaggtgcagggctctgatcatccatctcctcctctggtacctgcccgggcggnccgctctagaactagtgggatcccccggg

SEQ ID NO: 420 - DNA, 383 bp, Homo sapiens
ccgcggtggcggcccgggaccgagggtttggtgcacctcgatttggaggaagtagggcagggcccttatctggaaagaagtttggaaaccctggggagaaattagttaaaaagaagtggaatcttgatgagctgcctaaatttgagaagaatttttatcaagagcaccctgatttggctaggcgcacagcacaagaggtggaaacatacagaagaagcaaggaaattacagttagaggtcacaactgcccgaagccagttctaaacaattatttttactaaaatgcataattatgtgatagttatacatataccaacctgttatgtgagacaagctgacctgcaagtagtccaaggccagtgaatcaattactgcttgtacct

SEQ ID NO: 421 - DNA, 386 bp, Homo sapiens
  misc_feature 13, 210: n = A,T,C or G
cgcggtggcggcncgggaccgagggtttggtgcacctcgatttggaggaagtagggcagggcccttatctggaaagaagtttggaaaccctggggagaaattagttaaaaagaagtggaatcttgatgagctgcctaaatttgagaagaatttttatcaagagcaccctgatttggctaggcgcacagcacaagaggtggaaacatacanaagaagcaaggaaattcagttatgaggtcacaactgcccgaagccagttctaaacaattatttttactaaaatgcataattatgtgatagttatacatataccaacctgttatgtgagacaagctgacctgcaagtagtccaaggccagtgaatcaattactgcttgtacctcggc

SEQ ID NO: 422 - DNA, 590 bp, Homo sapiens
  misc_feature 448, 532: n = A,T,C or G
ccgcggtggcggcccgcccgggcaggtactgtccaactggatgctgccctggtggctgaaggcacacttcatgatgctgtccagggtcatcagggagacatgttgaaagagctccagacgtgagttttgggcaatgtgttcctcccatttgttcagcatcatccgaacactcttagacatcatggtgatgaatattttcagaatgctgatgttgaagccaggtttcacaatctggcggtgctttttccatttagaaccatccagggtcacaagtcctcgaccaacccaggattcaaggattttgtggctaacagcacttttgggatcttgtcttttcaggagaatcttgacatagtctgggtcatggatattgaaagaacatcgtaaagggtccaacccacaagggaacggcacatgggtatttttccatcagctcaggatacacctnaaactcttttactgggtaagactccttggggccataaaccagtgcgcaggggggtgcagggaaaccaggtgcatggcttctgancggccatctcctcctctggtaccttcggggcgcttctagaactagtgggatcccccgg

SEQ ID NO: 423 - DNA, 226 bp, Homo sapiens
  misc_feature 77, 93, 108, 137, 202, 215, 217, 225, 226: n = A,T,C or G
gcaggtacagcctgggctccagagtcagcctctacactcaccagactatggcggattcatcattatactgggaagcnacagcctgggccccanagttggtcatccgtncatgcacagatgaggagaggtctcaggangctttggccgtggtctgggaccttacctctttgtgtaatgagttgtttggtgtgaggcccagatnacaagggcccccncntacctcgnn

SEQ ID NO: 424 - DNA, 467 bp, Homo sapiens
tagggcgaattggagctccccgcggtggcggcccgaggtactgcctggagcacgacatccagcccagtggcaccatgcccagccacaaggccctggggagcagtgataactccttcaacaccttcttcagggagacccagcctggcaggcatgtgtcctgggctgtctgtggacctggagcctgctgtcataggttggcatcaactaccagtcccccacagtggtgcccgggggtgctgtagccaaggtgcagcgggcagtctgcgtgctaaacaataccacagccatcactgaggcctgggcccgcctcaaccaaaagtttgacctgatgtatgccaagcgggcatttatgcactgttatgtggacaggggcatggaggaaggtgtcgagcggccgccgggcaggtactacagcctgggtgactgagtgaggctctttctcaaaaaaaaaaaaaaaaagaaaaaag

SEQ ID NO: 425 - DNA, 553 bp, Homo sapiens
  misc_feature 518, 536: n = A,T,C or G
ccgcggtggcggcccgcccgggcaggtaccagaggaggagatggacgatcagagccatgcacctgtttcctgcaccccctgcgcactggttctatggccacaaggagtcttacccagtaaaagagtttgaggtgtatcctgagctgatggaaaatacctatgtgccgttcccttgtgggttggaccctttacgatgttcttcaatatccatgacccagactatgtcaagattctcctgaaaagacaagatcccaaaagtgctgttagccacaaaatccttgaatcctgggttggtcgaggacttgtgaccctggatggttctaaatggaaaaagcaccgccagattgtgaaacctggcttcaacatcagcattctgaaaatattcatcaccatgatgtctaagagtgttcggatgatgctgaacaaatgggaggaacacattgcccaaaactcacgtctggagctctttcaacatgtctccctgatgaccctggacagcatcatgaaagtgtgccttnagccaccagggcagcatncagttggacagtacctt

SEQ ID NO: 426 - DNA, 525 bp, Homo sapiens
  misc_feature 424: n = A,T,C or G
gactactatagggcgaaattggagctccccgcggtggcggcccgaggtacaggacattcctctgctcctattgcccctgtttccgttcttttcacactgtctgtgggtgctgtgccctgttggaactctctttaacgtcttacgttggagccgctaaccttccccaggtgtttgtcttcattgctttcacagggaaagaattactcgtcccactgacgagttctatgtatgtccctgggaagctgcatgatgtggaacacgtgctcatcgatgtgggaactgggtacctgcccgggcggccgaggtacgcgggaatgaggccattgctgaacttgatcactgaatgaagactcatacaaagacagcaccctcatcatgcagttgcttagagacaacctaacactttggacatcagacagtgcangagaaagaatgtgatgcggcagaaggggctgaaaactaaaatccatacagggtgtcatccttctttcctttaaagaaacctttttacacaatcttccattc

SEQ ID NO: 427 - DNA, 483 bp, Homo sapiens
  misc_feature 472: n = A,T,C or G
gacacggcttcctgggcggtcccctccacctgttgcttcaggtcctgcaagcccttgcttgccatggcttcggggtatctgtggagtcgtcaagagcagctggagcgacgttggatcctgcccagagtggcccccgcgtacctcggccgcccgggcaggtacaagcttacaaaactcagaccactcaccagaaaaaaatcggcatttatatagttgtgttacttttggtttcctgcatcttttcacatctggctcatttacatcattttcttcatcttccaaagtggagttagctactacattaggtaaggttacttcatcaatcaccatactgttataatcttgaaagtgaatttctttggaccctcccttgaatgcagttatacctagtaaacctgatccacaaccaagatccaagacttttttcccagcaaatttcactttggcctttgtgaaataaagccaggagggnaaaagggtcct

SEQ ID NO: 428 - DNA, 372 bp, Homo sapiens
cgggcaggtacaagcagtaattgattcactggccttggactacttgcaggtcagcttgtctcacataacaggttggtatatgtataactatcacataattatgcattttagtaaaaataattgtttagaactggcttcgggcagttgtgacctctaactgtaatttccttgcttcttctgtatgtttccacctcttgtgctgtgcgcctagccaaatcagggtgctcttgataaaaattcttctcaaatttaggcagctcatcaagattccacttctttttaactaatttctccccagggtttccaaacttctttccagataagggccctgccctacttcctccaaatcgaggtgcaccaaaccctcggtcc

SEQ ID NO: 429 - DNA, 182 bp, Homo sapiens
  misc_feature 12: n = A,T,C or G
atagggcgaatnggagctccccgcggtggcggccgaggtacgcgggaagatctacactattatgtcaccccagaaagtgaactctcagtcttcccagccagtctctttcttatcataggttagcttgcttattctggaatttcgcgtatacagatgcatgccatgccataggtacctgcccg

SEQ ID NO: 430 - DNA, 517 bp, Homo sapiens
  misc_feature 484: n = A,T,C or G
ccgcggtggcggccgaggtacaccgactacggcggactaatcttcaactcctacatacttcccccattattcctagaaccaggcgacctgcgactccttgacgttgacaatcgagtagtacctgcccgggcggccgcccgggcaggtactcttgctgcttggttgattaataaagcgggacgtccctttgagcagcctcaagaatatgatgaccctaatgcaacaatatctaacatactatccgagcttcggtcatttggaagaactgcagattttcctccttcaaaattaaagtcaggttatggagaacatgtatgctatgttcttgattgcttcgctgaagaagcattgaaatatattggtttcacctggaaaaggccaatatacccagtagaagaattagaagaagaaagcgttgcagaagatgatgcagaattaacattaaataaagtggatgaagaatttgtggaagaagagacagatnatgaagaaaactttattgatctcaacgttttta

SEQ ID NO: 431 - DNA, 497 bp, Homo sapiens
  misc_feature 468: n = A,T,C or G
tcgagcggccgcccgggcaggtacccttgctgatgtgggtcttcagctcctcttctgaatactccaccttgggccttttgttccagaaccttcattatcgtgttttctcttggtaactttcccttcaggattgtaatctggtgggtaaacaagctccttaaactcatccaccaaggagcccagtcttttattcattgcttcaaccttgggcaatgtcaggtccactgcttgttccggctccatcaaatccaaggccaaggcctccaggttcctgaagtgctgctgcagcacggggttctcaaagctgtcacttctgtacctcggccgaggtacaaactcgcattcatggcttggtttcccagaagatctccatttaacttttttaaagaaagtttattgctttctttaacctgcattttttctaagttttttttcacataaaggtgctgtctttgtggcaaggcctangcatgacaatcggaggactcgagggggat

SEQ ID NO: 432 - DNA, 368 bp, Homo sapiens
ccgcggtggcggccgttaaggacagttgtggcaaaggagaaatggtcacagggaatgggcggcggctccacctggggattcctgaggccgtgtttgtggaagatgtagattccttcatgaaacagcctgggaatgagactgcagatcagtattaaagaagctggatgaacagtacctcggccggctgttatgttcatcatggcacttaagagatgcttaacaaacctttcctacaatgttcctcagattttcagagcttatttgatctagcatctggttcctaaattctgagtcacatcagaagccaaacttgaatgcttttggaaagagctagcctcataccacttcagttgggaaggggagtacct

SEQ ID NO: 433 - DNA, 475 bp, Homo sapiens
  misc_feature 339, 356, 378, 388, 392, 397, 430, 458: n = A,T,C or G
ggagctcccccgcggtggcggccgaggtactgtccaactggatgctgccctggtggctgaaggcacacttcatgatgctgtccagggtcatcagggagacatgttgaaagagctccagacgtgagttttgggcaatgtgttcctcccatttgttcaacatcatccgaacactctcagacatcatggtgatgaatattttcagaatgctgatgttgaagccaggtttcacaatctggcggtgctttttccatttagaaccatccagggtcacaagtcctcgaccaacccgggattcaaggattttgtggctaacagccttttgggatcttgtcttttcangagaatcttggcattantttgggtcatgggacactgaanaacatcgttnaggnttcancccacagcgggaaacagcacatgggtatttttncatcagcttatgatacaccttcaaactnctttactgggtaaaacc

SEQ ID NO: 434 - DNA, 740 bp, Homo sapiens
  misc_feature 546, 654, 660, 699, 718, 724, 731: n = A,T,C or G
ccgcggtggcggccgaggtaccaaaaagactctcaaaaaccaatactcccacgggcaagggaatagccaagtttgttgcggtttccaatgaatgacatcagccctgtgtaggtctcaatcaaaatgggttcagttaacaccatcagttttttcctcttccagatccagttgaattcttgtgggcattctggatagctggaacaagcttagacatgaacccagacaacttgcaaatttcaaggaatttctcactggtgtatttcataggatgctcagtgaaagtagcataaggaacttcagtggaccatgggttccagcgggacagaagaggctgctcctccggactcccccagtagatcctaaggccttctccttgtctcttgtccagggacatcccagggaaggtgaacttgcccaggcagatgcgatagacagcgctcagaggaatccgcttgcagctgcacacaactcagcatgatgaagtcgtatttgcagatcaaggagaagtcttgttgtgaccagtaagaattctctccttctcattgntccagtgggtctatctttgtcaagagccagaagccttgaatggtcttttcagaagtcttaacttccgtgacctttcaagtctttcatggcagtcttaatgggcccccnggccgntctagaactagtgggatcccccgggctgcaaggaatttnattacaaagcttatcgatnccggcnaacctcnagggggggc

SEQ ID NO: 435 - DNA, 390 bp, Homo sapiens
cgcggtggcggcccgcccgggcaggtacagggcagtaattgattcactggccttggactacttgcaggtcagcttgtctcacataacaggttggtatatgtataactatcacataattatgcattttagtaaaaataattgtttagaactggcttcgggcagttgtgacctctaactgtaatttccttgcttcttctgtatgtttccacctcttgtgctgtgcgcctagccaaatcagggtgctcttgataaaaattcttctcaaatttaggcagctcatcaagattccacttctttttaactaatttctccccagggtttccaaacttctttccagataagggccctgccctacttcctccaaatcgaggtgcaccaaaccctcggtcc

SEQ ID NO: 436 - DNA, 421 bp, Homo sapiens
  misc_feature 256, 281: n = A,T,C or G
ccgcggtggcggccgaggtactgtccaactggatgctgccctggtggctgaaggcacacttcatgatgctgtccagggtcatcagggagacatgttgaaagagctccagacgtgagttttgggcaatgtgttcctcccatttgttcagcatcatccgaacactcttagacatcatggtgatgaatattttcagaatgctgatgttgaagccaggtttcacaatctggcggtgctttttccatttagaaccatccanggtcacaagtcctcgaccaacccangattcaaggattttgtggctaacagcacttttgggatcttgtcttttcaggagaatcttgacatagtctgggtcatggatattgaagaacatcgtaaagggtccaacccacaagggaacggcacataggtatttttccat

SEQ ID NO: 437 - DNA, 599 bp, Homo sapiens
  misc_feature 31, 350, 439, 525, 528, 551, 568, 592, 597: n = A,T,C or G
cggcccgaggttatcgttaggcatctcccangcgaccggctccgcagcaagatggcggacgagaaggacagggaagagataatagtagcagaatttcacaaaaaaatcaaagaggcatttgaagtctttgaccatgagtcgaataatacagtggatgtgagggagattggaacaattatcaggtcattaggatgctgtcctacggaaggagagctgcatgatctgattgcagaggtagaggaagaaagaacctactggatacattccgattcgaaaaatttcttcccgtgatgacagaaatactactagaaagaaaatacagaccaattccagaaagatgtccttcttcnagcttttgaggttttagattcaactaaacctgggtttcttactaagggccgagctgatcaagtatatgactgaagaagatggagtttcnctccctcgcccagctgaaatgccagtggcgtgatcttggctcgttgcaaccctcaccctcccggttcaagccattcttcctgcctnaanccttctgagcaactgggattggnaggccacacccaacacncctggctaaatttctgtatttttnggganaa

SEQ ID NO: 438 - DNA, 126 bp, Homo sapiens
  misc_feature 94, 100, 101, 102, 106, 107, 110, 112, 113: n = A,T,C or G
cgtggcccgtggctcacgtggcccctaagtttccgggtcttcctcagtctggatggcatgttggcagcccagacgaaaaagccccgcgtacctnggccgnnnaaannttntnnatcctccgggctg

SEQ ID NO: 439 - DNA, 146 bp, Homo sapiens
ccgcggtggcggccgttaaacatgtgtcactgggcaggcggtgcctctaatacaggtgatgctagaggtgatgtttttggtaaacaggcggggtaagatttgccgagttccttttactttttttaacccttccttcccgcgtacct

SEQ ID NO: 440 - DNA, 45 bp, Homo sapiens
aggaatttcgatatccaagcttatcgaatacccgtcgacctcgag

SEQ ID NO: 441 - DNA, 266 bp, Homo sapiens
  misc_feature 2: n = A,T,C or G
ancactacttagggcgaattggagctccccgcggtggcggccgaggtacgcggggacctcattcatttctaccggtctctagtagtgcagcttcggctggtgtcatcggtgtccttcctccgctgccgcccccgcaaggcttcgccgtcatcgaggccatttccagcgacttgtcgcacgcttttctatatacttcgttccccggcaaaccgcaacccatttgacgccaatgtcggggttattccgagttgaccgaagaccgcggc

SEQ ID NO: 442 - DNA, 238 bp, Homo sapiens
  misc_feature 178, 187: n = A,T,C or G
ccgcggtggcggccgccatggagcagccgccggcgcctaagagtaaactaaaaaagctgagtgaagacagtttgactaagcagcctgaagaagtttttgatgtattagagaagcttggagaagggtcttatggaagtgtatttaaagcaatacacaaggaatccggtcaagttgtccncaatttaancaaagtcccttgggccgctcttagaaactagtgggatcccccgggctgcag

SEQ ID NO: 443 - DNA, 213 bp, Homo sapiens
  misc_feature 177, 181, 182, 191, 206: n = A,T,C or G
ccgcggtggcggccgaggtacacgtctctgtctgggcctcggccagggtgccgagggccagcatggacaccaggaccagggcgcagatcaccttgttctccatggtggccattgcctcctctctgctccaaaggcgaccccgagtcagggatccccgcgtacctgcccgggcggccngttnnaaaaactantggatcccccgggcntgcagga

SEQ ID NO: 444 - DNA, 190 bp, Homo sapiens
  misc_feature 155, 161, 183: n = A,T,C or G
ccgggcaggtacgcggggaggccgtaggaggaagatggcggtggagtcgcgcgttacccaggaggaaattaagaaggagccagagaaaccgatcgaccgcgagaagacatgcccactgttgctacgggtcttcaccaccaataacggccgctctngaactngttggatcccccgggcctgcanggaattc

SEQ ID NO: 445 - DNA, 139 bp, Homo sapiens
cttagggcgaattggagctccccgcggtggcggccgtgcatcatcatggagttagtgaggcgctccacaatgggacactgagctttgcggaagcgtttggcggcataccgccctgcactgtgaggcaggtacctgcccg

SEQ ID NO: 446 - DNA, 51 bp, Homo sapiens
  misc_feature 6, 10, 11, 38: n = A,T,C or G
tatttnaatnncccgtccacccttcgaggggggggggnccgggtacccagc

SEQ ID NO: 447 - DNA, 31 bp, Homo sapiens
  misc_feature 6: n = A,T,C or G
attgcncgcttgggcgtaaatcatgggtcat

SEQ ID NO: 448 - DNA, 70 bp, Homo sapiens
  misc_feature 33, 46, 56: n = A,T,C or G
cgctccacaaatttccacaccaacataccgaanccgggggagccantaaaaagttnttaaaagccctggg

SEQ ID NO: 449 - DNA, 269 bp, Homo sapiens
  misc_feature 23, 203, 217, 220, 235: n = A,T,C or G
actatagggcgaattggagctcnccgcggtggcggccgcccgggcaggtacccaatagtggatgggaagctttccatccagtgctacttgcgggccttggatcgatgttacacatcataccgtaaaaaaatccagaatcagtggaagcaagctggcagcgatcgacccttcacccttgacgatttacagtacctcggccgctnttaaaactagttgnatncccccgggcctgcanggaattccgatatcaaagctttatcgataccgtc

SEQ ID NO: 450 - DNA, 448 bp, Homo sapiens
  misc_feature 6, 115, 144, 145, 146, 147, 153, 209, 217, 224, 287, 373,402, 424, 429: n = A,T,C or G
cgactncttagggcgaattggagctccccgcggtggcggccgcccgggcaggtgctgtgagtgctctggcgaagtttggagcccagaatgaagagatgttacccagtatcttggngttgctgaagaggtgtgtgatggatgatnnnnatgaantaagggaccgagccaccttccacctaaatgtcctggagcagaagcagaaagccccnttaattcnaggcttntatcctaaaatggtctgactgttgtccatccctggtctggagaggactctgcagcagtacctnggccgcccgggcaggtacaaaatgatttcccaaagttcttgaagtgccttgagaacatgtgggtccgagttgttataacagactcntcccccgggtcaccttttgcctggtcatnctgttagagtacctttggccgntctanaactagtgggatcccccgg

SEQ ID NO: 451 - DNA, 156 bp, Homo sapiens
  misc_feature 113, 147, 151: n = A,T,C or G
cgactacttagggcgaattggagctccccgcggtggcggccgaggtacgcggggaggaggtcgagagtcgttcttctctttgcacagacgtgactctgcagctctttaacggngcccgctgctctcaacccagcttaccccactttntccnatggc

SEQ ID NO: 452 - DNA, 33 bp, Homo sapiens
  misc_feature 3, 11, 15: n = A,T,C or G
ttnaaactttnttcnatacccgtccgacctcga

SEQ ID NO: 453 - DNA, 131 bp, Homo sapiens
atttgtttatcccgctcacaattccacacaaacaataccgaagcccggggaagccataaaaagtgtaaaggccttgggggtgcctaatggagtgagcttaactcacattaattgcgttgccgctcactgcc

SEQ ID NO: 454 - DNA, 339 bp, Homo sapiens
  misc_feature 70, 71, 73, 109, 119, 120, 156, 161, 167, 170, 171, 173,179, 208, 217, 219, 222, 226, 243, 264, 273, 277, 280, 282,319: n = A,T,C or G
aggtaccttctggggcatacaacgtggcagcagggcctcgggaagaggggtaggaggaccgagcagcaanngngtgtcttaggaagacaggaaaaaaaaacccttttgncacacatgcnnggagggttgtccctgaaaagaagggcaggttggganaggtncccctngtnncntttaanaaaaaaaggccccccaggtgggccaaaanaagccaccnanttnaaangtaggggaattgaatcnatataaaaaaaaacaaaatcnaccgcccanaaantanangggaaccaaaattcaatccttttccaccgggttttcnttttcccaacccaagaaaaa

SEQ ID NO: 455 - DNA, 418 bp, Homo sapiens
  misc_feature 366: n = A,T,C or G
aattggagctccccgcggtggcggccgggaccgagggtttggtgcacctcgatttggaggaagtagggcagggcccttatctggaaagaagtttggaaaccctggggagaaattagttaaaaagaagtggaatcttgatgagctgcctaaatttgagaagaatttttatcaagagcaccctgatttggctaggcgcacagcacaagaggtggaaacatacagaagaagcaaggaaattacagttagaggtcacaactgcccgaagccagttctaaacaattatttttactaaaatgcataattatgtgatagttatacatataccaacctgttatgtgagacaagctgacctgcaagtagtccaangccagtgaatcaattactgcttgtcctcggccgctctagaactaagtggatc

SEQ ID NO: 456 - DNA, 169 bp, Homo sapiens
cgaattggagctccacccgcggtggcggcccgcccgccatgggaccacgtggggtaagttgggttgagagcagcgggcgccgttaaagagctgcagagtcacgtctgtgcaaagagaagaacgactctcgacctcctccccgcgtacctcggccgctctagaactagtg

SEQ ID NO: 457 - DNA, 227 bp, Homo sapiens
cgcccgggcaggtacagcctgggctccagagtcagcctctacactcaccagactatggcggattcatcattatactgggaagcaacagcctgggccccagagttggtcatccgtccatgcacagatgaggagaggtctcaggaagctttggcgtggtctgggaccttacctctttgtgtaatgagttgtttggtgtgaggcccggtcacaagggcccccgcgtacct

SEQ ID NO: 458 - DNA, 331 bp, Homo sapiens
  misc_feature 249, 318: n = A,T,C or G
cgcggtggcggcccgcccgggcaggtacactgccaaacccgcagaagtgcccagggaaagccccgcgggggctgcggatagtcacggctgatggaaagctgacagcggaacaaggacgcaacgtcactctcatggtgcaattagaagagggtgatgttcagccggacactcatccaagtggactttggcgatggtatcgcggtgtcttacgtcaatctcagctccatggaagatgggatcaaacacgtntatcagaacgtgggcattttccgtgtgaccgtgcaggtggacaacagtctgggttctgacagcgccgtnctgtaccttcggc

SEQ ID NO: 459 - DNA, 70 bp, Homo sapiens
  misc_feature 27, 45, 48: n = A,T,C or G
tgatatcaagcttatcgataccggtcnacctctagggggggcccnggncccaactttttgttccctttag

SEQ ID NO: 460 - DNA, 138 bp, Homo sapiens
  misc_feature 86: n = A,T,C or G
ttaggcgaatggactccacgcggtggcggccgtccgggcaggtaccaggatgtccagtgcgaccatcttttccagcagggccaganggaccagcagggcccctaggaccagcaggacccacggagccaggagcacctt

SEQ ID NO: 461 - DNA, 48 bp, Homo sapiens
gaatgccttgtgggccactaggacctcttgggccaaccccgcgtacct

SEQ ID NO: 462 - DNA, 281 bp, Homo sapiens
cgaattggagctccccgcggtggcggccgcccgggcaggtacctgcggaggcagcggctgctgcgggacctgcgccccttcccagcgccccccacccactggttccttgggcaccagaagtttattcaggatgataacatggagaagcttgaggaaattattgaaaaataccctcgtgccttccctttctggattgggccctttcaggcatttttctgtatctatgacccagactatgcaaagacacttctgagcagaacagatcccaagtcccagtacct

SEQ ID NO: 463 - DNA, 242 bp, Homo sapiens
ggcgaattggagctccccgcggtggcggccgccgggcaggtactttactgcacccagcagactttcaacaactcattgatccaaagatacatgcacagtctgagcaccagctatggtgctcataacttctttaagacttgaaccctttcaatctgtgtgattcattaaattggaccattgatgataagaatacacattgtatgtttctgtgcacatgacagtgtgtgtgtgtgcacgtacct

SEQ ID NO: 464 - DNA, 451 bp, Homo sapiens
  misc_feature 39, 105, 331, 386, 440: n = A,T,C or G
aggtactggcaaaaaaaatatgctcggtggttccagcanaagccaggccaggcccctgttctggtgatttataaagacggtgagcggccctcagggatccctgancgattctccggctccagttcacggaccacagtcaccttgaccatcagcggggcccaccttgaggatgaggctgactattactgttactctacgactgacaacaatggggtgttcggcggagggaccaagctgaccgtcctacgtcagcccaaggctgccccctcggtcactctgttcccgccctcctctgaggagcttcaagccaacaaggccacactggtgtgtntcataagtgacttctacccgggaaccgtgacagtggcctggaaggcagatagcanccccgtcaaggcgggagtggagaccaccacaccctccaaacaaagcaacaacangtacctgcccg

SEQ ID NO: 465 - DNA, 414 bp, Homo sapiens
  misc_feature 256, 264, 391, 394, 403: n = A,T,C or G
acatggatggctctcaagacagccctatctttatgtatgcccctgagttcaagttcatgccaccaccgacttatactgaggtgaggattgtcatctttactgttaaatttgtcctaagctttctataagaagttgacttagacggattgctaaactggtttgttctttttgttcttacctgaactgaaatagtctgtttctttctttaggtggatccctgcatcctcaacaacaatgtgcagtgagcatgtggaanaaaagaancagctttacctacttgtttctttttgtctctcttcctggacactcactttttcagagactcaacagtctctgcaatggagtgtgggtccaccttagcctctgacttcctaatgtaggaggtggtcancangcaatctcntgggccttaaa

SEQ ID NO: 466 - DNA, 145 bp, Homo sapiens
  misc_feature 28, 34, 35, 37, 38, 40, 41, 51, 70, 101: n = A,T,C or G
gcgcgtaatacgactactatagggcganttgaanntnnanncggccgaggnaccttgatctcctggcggnggctcgtccctggtcttagttccaccgggcngcgggagtcaggaccgcctgtcctcagacccctccgcagcgact

SEQ ID NO: 467 - DNA, 640 bp, Homo sapiens
  misc_feature 99, 103, 116, 131, 158, 167, 174, 197, 202, 213, 229, 230,247, 250, 253, 257, 261, 267, 268, 285, 295, 305, 335, 341,343, 350, 352, 353, 364, 365, 373, 383, 386, 403, 407, 437,449, 465, 472, 473, 474, 483, 486, 491, 502, 513, 516: n = A,T,C or G
  misc_feature 519, 526, 542, 544, 546, 548, 584, 591, 596, 614, 616, 618,619, 621: n = A,T,C or G
ccgcggtggcggccgaggtactttttttttttttttttttttttttatttttttttttttttttttttttttttttgctctaaagggggtagagggggngctntagggtaaatacnggccctatttcaaanatttttaggggaattaattttaggacnatgggcatnaaactgnggtttgctccacaaatttcaaancattntcgagcggccncccgggcaggtacttnnttttttttttttttttnggnggnaatnttgntttgtnncccaagctggagtgcantggcatggtntttggttaantgcaaccttcacctttcctagtttaaagcnattttntnctgcctnanncctcccctaannagcttggngattacaggnaanatgccccccaatagccngggnaaaattttttggaatttttagcaaaaaaanaagggtttttcnccattgcttggcccanggcttannntttaaaaanttncctgnccctttaaagnggaatcttggnccnccntttgggnccgttttttaaaaaantngntnggaattcccccccggggctttggagggaaaattttnaattttncaaancctttattttaattcccngncnnancctttgagggggggggggc

SEQ ID NO: 468 - DNA, 634 bp, Homo sapiens
aggtactgtccaactggatgctgccctggtggctgaaggcacacttcatgatgctgtccagggtcatcagggagacatgttgaaagagctccagacgtgagttttgggcaatgtgttcctcccatttgttcagcaccatccgaacactctcagacatcatggtgatgaatattttcagaatgctgatgttgaagccaggtttcacaatctggcggtgctttttccatttagaaccatccagggtcacaagtcctcgaccaacccaggattcaaggattttgtggctaacagcacttttgggatcttgtcttttcaggagaatcttggcatagtctgggtcatggacactgaagaacatcgtaaagggtccaacccacaagggaacagcacatgggtatttttccatcggcttatgatacacctcaaactcctttactgggtaaaactccttgtggccatagaaccagtgggcagggggtgcaggaaacaggtgcagggctctgatcatccatctcctcctctggtacctgcccgggccggccgctcgaaggtacgcgggtgaagaaaaggctctaacatgagtttgatcttgagccccaatgttgaacaagcttccagacctttacaattttaa

SEQ ID NO: 469 - DNA, 431 bp, Homo sapiens
  misc_feature 54, 188, 201, 306, 373, 376, 429: n = A,T,C or G
ttgaggagagacacatgggtgggaaattgcaataaaaagacggcccatagcaangctgcattcccatggctggccagaggaggaacgctttgtgttctcatcggagctgcatgggaagtctgcatacagcaaagtgacctgcatgcctcaccttatggaaaggatggtgggctctggcctcctgtggntggccttggtctnctgcattctgacccaggcatctgcagtgcaagcgaggttatggaaaccccattgaagccagttcgtatgggctggacctggactgcggagctcctggcaccccanaggctcatgtctgtttttgacccctgtcagaattacaccctcctggatgaacccttccgaagcacantanaactcagcagggtcccatgggtgcgataaaaacatgagcggctggtacctgcncg

SEQ ID NO: 470 - DNA, 64 bp, Homo sapiens
  misc_feature 1, 23, 40, 42, 46: n = A,T,C or G
nggaatttaatatcaagcttatngatacccgttctaaccntngganggggggggccccggtacc

SEQ ID NO: 471 - DNA, 428 bp, Homo sapiens
  misc_feature 372: n = A,T,C or G
tgtgggtgagttggctgccggtgagttgggtgccggtggagtcgtgttggtcctcagaatccccgcgtagccgctgcctcctcctaccctcgccatgtttcttacccggcctgagtacctcggccgcccgggcaggtactgttttgaggagaaggatcagctatccagcgactgtgagcatgaacaagagccaagcctagagacataatcatcttgaccctctgagttacaggattcggcttattttcttcttcttctaaaactcgggcaaaatggctgagctgccaaattggacgaccctcgcggctttcccgagaaagctctaataccaaggacacacaagctgggaagaaagtcatgaacacgaagtanttggcaagaactgacatgcagccaaagcagcacataatttcaagctgaccgtacct

SEQ ID NO: 472 - DNA, 279 bp, Homo sapiens
  misc_feature 5, 25: n = A,T,C or G
ccggncaggtacgcgggggctgtangctcaggaggcagagctctgaatgtctcaccatggcctggatccctctcctgctccccctcctcattctctgcacagtctctgtggcctcctatgagctgacacagccatcctcagtgtcagtgtctccgggagagacagccaggatcacctgctcaggaaatgtacctcggccgaggtacgcgggggcacttggcttcaaagctggctcttggaaattgagcggagagcgacgcggttgttgtagctgccgct

SEQ ID NO: 473 - DNA, 415 bp, Homo sapiens
aggtacctgcaggcctcctacacctacctctctctgggcttctatttcgaccgcgatgatgtggctctggaaggcgtgagccacttcttccgcgaactggccgaggagaagcgcgagggctacgagcgtctcctgaagatgcaaaaccagcgtggcggccgcccgggcaggtacttgttgttgctttgtttggagggtgtggtggtctccactcccgccttgacggggctgctatctgccttccaggccactgtcacggctcccgggtagaagtcacttatgagacacaccagtgtggccttgttggcttgaagctcctcagaggagggcgggaacagagtgaccgagggggcagccttgggctgacccaggacggtcagcttggtccctccgccgaataccacataaatacctt

SEQ ID NO: 474 - DNA, 369 bp, Homo sapiens
  misc_feature 80: n = A,T,C or G
cgggaccgagggtttggtgcacctcgatttggaggaagtagggcagggcccttatctggaaagaagtttggaaaccctgnggagaaattagttaaaaagaagtggaatcttgatgagctgcctaaatttgagaagaatttttatcaagagcaccctgatttggctaggcgcacagcacaagaggtggaaacatacagaagaagcaaggaaattacagttagaggtcacaactgcccgaagccagttctaaacaattatttttactaaaatgcataattatgtgatagttatacatataccaacctgttatgtgagacaagctgacctgcaagtagtccaaggccagtgaatcaattactgcttgtacct

SEQ ID NO: 475 - DNA, 227 bp, Homo sapiens
ccgcggtggcggccgcccgggcaggtactttactgcacccagcagactttcaacaactcattgatccaaagatacatgcacagtctgagcaccagctatggtgctcataacttctttaagacttgaaccctttcaatctgtgtgattcattaaattggaccattgatgataagaatacacattgtatgtttctgtgcacatgacagtgtgtgtgtgtgcacgtacct

SEQ ID NO: 476 - DNA, 421 bp, Homo sapiens
  misc_feature 15, 35, 39, 45, 120, 127, 130, 250, 261: n = A,T,C or G
ccgggcaggtactanaagctgggggaaaaagagtnggtnaaacanacatggccttggcccttctggaatttacattctcgtatgtgtcatgaaagttgttttgaaaaaacccaaaccatngtttttnctntgctttcacactacaacaatcaacacagaagacttctgtgactccaaaaaatatgtaaggatttctccccaccaccaggcaagcaatcagttctgcagcggacaccagttgggtgttctncaattcaattncaacactatctacctagagacagcatcagatcccacagcatgagggctcaatgcccaagctgccccacagccccctgggcaccagtagcaagtctgggcctctggaacttctttttttgcagagatggggtctcactatattgcccagactgggggctca

SEQ ID NO: 477 - DNA, 251 bp, Homo sapiens
  misc_feature 48, 96, 98, 99, 100, 101, 103, 104, 118, 121, 139, 147, 150,188, 210, 239, 250: n = A,T,C or G
caccgccggtggccgccggcttgttattgctcatcatggcacttaaanagatgcttaacaaacctttcctacaatgttcctcaaattttcagagcntnnnngnngggagcatctggtnccnaaaaaaaaaattcttttnaagccaanctngaatgcttttggaaagagctagcctcataccacttcanttgggaagggggagtacctcgncccctctaaaaactaatgggatccccccnggcctgccaana

SEQ ID NO: 478 - DNA, 131 bp, Homo sapiens
  misc_feature 37, 99: n = A,T,C or G
tgatgtataaagacagcgagcggccctcagggatctntgagcgattctccgactccagttcacggaccacagtcaccttgaccatcagtggggcccacnttgaggatgaggctgactattactgttactgt

SEQ ID NO: 479 - DNA, 110 bp, Homo sapiens
  misc_feature 14, 15, 17, 20, 26, 27, 29, 32, 36, 49, 51, 55, 57, 62, 68,69, 87, 89, 91, 96, 101: n = A,T,C or G
agctgtttcctganncnctnaaactnncnaangaangcattttttaaanancttngnttttnggcctnnttaaaaccaatttaaacntntntgaanttttnggattttaa

SEQ ID NO: 480 - DNA, 690 bp, Homo sapiens
  misc_feature 55, 56, 58, 59, 70, 72, 84, 104, 117, 121, 123, 126, 128,129, 131, 135, 136, 138, 139, 140, 141, 144, 148, 151, 153,159, 160, 166, 169, 174, 175, 176, 177, 182, 183, 184, 197,200, 205, 209, 211, 216, 217, 220, 221, 222, 225, 228: n = A,T,C or G
  misc_feature 231, 233, 234, 235, 239, 241, 243, 244, 247, 250, 255, 259,260, 268, 271, 272, 273, 277, 280, 284, 287, 290, 296, 300,303, 310, 311, 313, 323, 328, 344, 345, 346, 366, 367, 383,400, 404, 405, 407, 418, 420, 421, 427, 433, 435, 436: n = A,T,C or G
  misc_feature 455, 462, 503, 516, 527, 539, 546, 549, 560, 580, 581, 588,593, 594, 599, 600, 603, 608, 612, 620, 625, 626, 634, 637,640, 641, 644, 646, 650, 651, 652, 653, 654, 658: n = A,T,C or G
tggagctccccgcggtggcggccgaggtacttttttttttttttttttttttaanncnnttttttttttntntttttttttttntttttttttttttttttttnttttttttttgtncccnanccnannangacnntnnnnttntttnttnanaaaaannaaaaanaangcccnnnnttatnnnaaaaaaaaaaaanatnttttntttncnctccnncannnccngangangnnngggngntnncgnganaaaanaatnngagggggnttnnncaanaanaaangtnccncccctnttancantttgaannangaaaggggcnggatnttggaagctgtgagannntccccgaggaacctcctgcnntttcttctcctgaagngcttatgaaggggcgancatnntnctccatacatncnnatttcntatagngnncccaaagggacccaccttnctccctngaaatttggcttaaagcaacaaataaagttttttttttggnggggaagggaaanggctctttttncttgctgtttcnaaaatgnggngaacccatttnatgtttctggggggaggaannccccccnggggnnaattnnaanaaaanaaancccccccnccggnnaaaaaaantanttnnatnanatannnnncccnaaaagggggggggggccccccccccctttttt

SEQ ID NO: 481 - DNA, 518 bp, Homo sapiens
  misc_feature 75, 78, 81, 97, 112, 218, 505: n = A,T,C or G
tggagctccaccgtggtggcggccgaggtacaacgcagaagcagggtcctgagttgggagccagtgggccctgancantancacgaggcctgttgtntaccaagtgcagttnaaatacaccgacagtaaatggttcacggccgcccggcaggtcagtgccccccgtgaaagacagaattgtggttttcctggtgtcacgccctcccagtgtgcaaatnagggctgctgtttcgacgacaccgttcgtggggtcccctggtgcttctatcctaataccatcgacgtccctccagaagaggagtgtgaattttagacacttctgcagggatctgcctgcatcctgacgcggtgccgtccccagcacggtgattagtcccagagctcggcttgccacctccaccggcacctcagacacgcttctgcagctgtgcctcggttacaacacagattgactgctctgactttgactactcaaaattggcctaaaaattaaaagagatcgatnccaaaaaaaaaaa

SEQ ID NO: 482 - DNA, 601 bp, Homo sapiens
  misc_feature 4, 5, 9, 11, 13, 15, 26, 84, 87, 90, 112, 117, 120, 123,126, 130, 131, 135, 139, 140, 155, 161, 163, 168, 169, 172,175, 184, 186, 187, 189, 191, 192, 197, 218, 226, 233, 258,266, 277, 282, 283, 287, 288, 290, 292, 296, 303, 304: n = A,T,C or G
  misc_feature 305, 307, 310, 311, 313, 315, 321, 322, 323, 349, 352, 355,358, 359, 369, 383, 387, 399, 420, 439, 462, 463, 470, 506,509, 514, 530, 547, 563, 572, 574, 583, 585, 590: n = A,T,C or G
acgnncctntntntncaggccatggnaaaaaaaatccaattatagaccgtcttgagagtgtggtcttgcttcttatgtagtatnaanttngagaactgataattaatgcatngattnacnttnttnaacnnattnaatnntaattgtgaaaaaanaattcnangcacnnatngtnaaattgaanannanannagganatttaagaccttgaggagctngagccggncattatnttaaatgtgaggggtttatgacacngtaccctncaatggtgttnactanncttnngnanatgnacatgcnnncnatnntncncattgnnncttaaggcgtttggggtcacacagtnttnaangtnntagaagaccngtcccctaggagtncccntgatttcatctnaacatctttgctgatgctcanaggtacttttgccaagcantaaaagatccaggtatatagcanntagttgnggtgtcatgtactgcaaacatgcaaacagttttttnaanttcanccttgggcagaatctnctttcaatagaaaagtncttttggcgtttttcnactttttgngnaactccaananagttnttgttcccaga

SEQ ID NO: 483 - DNA, 801 bp, Homo sapiens
  misc_feature 13, 22, 26, 28, 29, 31, 39, 42, 46, 47, 49, 50, 51, 56, 57,59, 60, 61, 66, 67, 76, 79, 81, 85, 86, 88, 90, 91, 94,95, 96, 100, 101, 103, 104, 105, 106, 108, 109, 113, 114,115, 120, 127, 128, 131, 134, 137, 141, 142, 145, 148, 151: n = A,T,C or G
  misc_feature 152, 153, 156, 163, 166, 172, 205, 220, 227, 232, 237, 241,243, 251, 254, 255, 256, 257, 260, 265, 270, 277, 281, 283,321, 322, 332, 334, 373, 389, 406, 418, 433, 442, 455, 456,464, 474, 490, 515, 518, 520, 523, 525, 526, 533, 552: n = A,T,C or G
  misc_feature 554, 565, 582, 594, 615, 622, 624, 631, 645, 648, 650, 655,668, 682, 685, 686, 690, 706, 707, 709, 713, 715, 728, 729,734, 742, 744, 745, 746, 751, 755, 760, 761, 765, 766, 769,772, 780, 790: n = A,T,C or G
ccgggcaggtacnccattgagngctntnntnccttagcnacnaggnngnnnctggnnannngaaanntcactaaantgnanttannantnnagnnnaacnngnnnntnntgtnnntcatncatgaannttncanctnttannctnttntgnnnggnctgcccnttnttctanacgtggatggtggaataaccattgatctgagcnaacctttattgtgancaactantgaanaaggncaancntgtcttantannnnganggaanagctncatctcnacancnaaacaaaccatcaaggtttgccacttgttgaaatttgnngccacaactncngactacactgacttgacaattaaacccactccccttttnaagggtttccttccgntaaaagattgggaaganggccatattatncaacaaactcattanatccccgtnacagtacgagtannctatatgnaaactaccanttgggctttgattttnattcgtaacgcattgcttttttttntgnancantnntacactncattttttaagaattcaantntttaaaaattngtttgcttttccttaangaaattcatccnggccaaggaataagggggggngttttantnggaattntaagggccaaaggnttncnccccncaataaaaattgnttgctacaaacttnacnncaanaaaaagagttttgggnncntttntnccccaaaaaaatnnaaacntccaaccnannnattcntaanctcgnntttnnaangtnctaacaanttttaggganttttttttttt

SEQ ID NO: 484 - DNA, 194 bp, Homo sapiens
  misc_feature 4, 5, 9, 14, 16, 17, 24, 25, 27, 31, 40, 45, 57, 60, 65,70, 72, 75, 77, 88, 90, 96, 99, 100, 108, 109, 121, 125,127, 128, 133, 139, 142, 145, 163: n = A,T,C or G
aggnncccntattngnntttttgnnanacantccatgganaaacnggtggagctgcnccnaggcnctgancntgncnccctctactgnantaactntanncacgactnntacttactctgngctngnngtganaagggnacntgnccgggcggccgacgtacnggtgctctccaggctggcagcccgctgccta

SEQ ID NO: 485 - DNA, 563 bp, Homo sapiens
  misc_feature 4, 8, 11, 19, 21, 24, 25, 27, 33, 35, 36, 38, 39, 40, 45,49, 50, 52, 61, 62, 64, 66, 68, 70, 101, 119, 123, 130,136, 138, 171, 178, 209, 216, 225, 236, 239, 240, 243, 244,249, 271, 274, 275, 279, 293, 299, 306, 319, 333, 347, 349: n = A,T,C or G
  misc_feature 350, 360, 369, 379, 384, 387, 390, 394, 395, 399, 416, 422,454, 458, 472, 478, 502, 504, 516, 518, 521, 523, 528: n = A,T,C or G
acgngccnggnacagtggnangannanggcccncnntnnnatttncctnncnggcctaagnnantntntnacttgcagcctcccaattatctgggactacnggcgcatgcaaccatacntggntaattcntgtatntnttgtggagacagcatgtggctgtctctacatanctcatgntgtccgcccaggcacagtgattaaactcccnggctcangtgatcctnctgcctgggcntgnnaanntgctnggattacaggcatatgccagcntgnnctgnctttcctgtatttngtaatntaggaantgggagttcatgntgggaggcacattncctataggactccngnncaacctacgntgaaaatangtattcctanaaaanggnttntacnnactnatattacggggcaccantattgntatcaacctgagaatgctttttacattatttngagnagaacctacgtgtnattcanatagtaaaaactcaaaccctaaancngagtgagagcancntangnttcangttttctaatatccttaagattttcctttgcttcc

SEQ ID NO: 486 - DNA, 353 bp, Homo sapiens
  misc_feature 16, 21, 47, 49, 51, 56, 58, 62, 64, 65, 69, 71, 109, 111,129, 145, 150, 165, 166, 182, 184, 186, 190, 201, 207, 213,215, 216, 220, 221, 222, 229, 237, 246, 250, 251, 252, 254,259, 260, 267, 270, 271, 274, 275, 282, 292, 309, 310: n = A,T,C or G
  misc_feature 315, 316, 324, 331: n = A,T,C or G
ccgggcaggtacttgnggaantcatgcctggaaggggcttgggcacntnantaagncngccntnntttngntaaaaggagggaaaaatctacttgaattgacttaccanangcttgataacagagatgnctaggattaaaatccngatantgacaaatccacccnnaaatcccatcttctantntnatgnccccccgcctncctgantcgctntnnaacnnnatggatnccccgggntctaggaangggnnntnaagcnnatctatnccnnccnnctctganggggggcccngcacccagcttttagtnnccttnnataggggnttaatgngcgcgcttggcgtaatcatggt

SEQ ID NO: 487 - DNA, 207 bp, Homo sapiens
  misc_feature 34, 45, 46, 81, 96, 115, 116, 118, 170, 179, 180, 189: n = A,T,C or G
gctccacccccggtggcggccacaggagcacatntccctcttctnnaggtgtgtccctcagcatgacgctgactgatgtgncataaagactgactngtgacactggctagtgctnncnagccatctagactacaacttattctagatacaccctggagagatcttaaagngcatatctnnttcacccanagaaggcatttatgcctt

SEQ ID NO: 488 - DNA, 821 bp, Homo sapiens
  misc_feature 61, 63, 68, 69, 76, 82, 88, 90, 92, 93, 94, 99, 106, 109,112, 113, 114, 118, 123, 124, 130, 131, 132, 133, 134, 139,140, 141, 142, 144, 159, 162, 173, 174, 180, 193, 194, 195,199, 201, 202, 204, 206, 210, 213, 214, 215, 216, 217: n = A,T,C or G
  misc_feature 222, 224, 229, 231, 233, 241, 246, 247, 249, 250, 251, 254,255, 256, 260, 270, 274, 276, 277, 290, 292, 297, 298, 299,307, 308, 309, 310, 311, 312, 315, 320, 324, 325, 330, 331,339, 341, 349, 350, 360, 363, 364, 368, 369, 372, 380: n = A,T,C or G
  misc_feature 387, 388, 389, 392, 393, 395, 396, 402, 413, 417, 419, 420,421, 422, 423, 424, 425, 434, 439, 441, 442, 443, 451, 452,454, 455, 457, 462, 464, 465, 466, 469, 470, 472, 482, 487,493, 494, 501, 510, 512, 516, 522, 523, 540, 541, 543: n = A,T,C or G
  misc_feature 544, 546, 551, 560, 564, 581, 602, 604, 605, 628, 630, 635,636, 638, 644, 651, 652, 659, 662, 664, 666, 676, 684, 688,691, 696, 697, 698, 703, 704, 708, 712, 713, 719, 739, 748,749, 750, 756, 757, 760, 765, 778, 787, 796, 797, 800: n = A,T,C or G
  misc_feature 801, 804, 810, 811, 813: n = A,T,C or G
attggagctccccgcggtggcggccgcccgggcaggtactttttttttttttttttttttngnaaaannggggggnaaaaantccccnantnnntttanttttttnaanccnnncttnaaaanncccccnnnnnggggnnnncngggggggaaaaaaanacntggggggaaannaaaaanttgggccttaaannncaancnnangntttnaannnnnccccngnttttncngnaaaaaaanttttnntnnntcnnnaaanaaaaaattgntctntnngggggaaaaaaangnccccnnngggggggnnnnnnccnaattntttnnggggnntttttaangngggggggnngaacccaaanccnntttnnaangggggggntttttannnccnnanngggggnaaaaatttttncccncnnnnnnngggtttttnccaangnnnaaaaaagnntnncnttttngnnnaanncntaaatttccnggggnttttanngggtttnggggccaantnaaanggaaannaaaaattttttttggannanncnttttncccccggcngggngggtttccccccccccnaaaaatttcccacattttttncnnaaaaagggggggccttttaaccntncaaannancccccntgggttnngggggtnaanantngggccccccnaaaagttntttnaanaaaannnttttnnaaangggnngggggnccccccctgtttattaaatngggaaaccnnnaaaacnnggnggttnaaaaaaaagggancccccgggngggaaattnntannaantttttnnancccccccc

SEQ ID NO: 489 - DNA, 234 bp, Homo sapiens
  misc_feature 1, 2, 3, 5, 8, 13, 19, 24, 27, 33, 37, 40, 47, 49, 50, 51,52, 57, 77, 78, 86, 87, 90, 93, 102, 105, 106, 117, 118,119, 122, 129, 131, 135, 141, 146, 154, 162, 165, 167, 173,178, 179, 181, 183, 184, 189, 195, 201, 210, 211, 216: n = A,T,C or G
  misc_feature 218, 220, 223, 227, 229: n = A,T,C or G
nnngngcnggtancttggncggtnttnacgggnttcntgntcatggngnnnnggatnacgtgatactagacaaaaannccattccnnccnagnatgtcttgngcnnggcgggcgatnnncanggctttncnacangtattnctctncagcaganaaaccatnttngnggcagncttgnncngnnccttnaagcanccgctntaaaactannggatncncnggnctgnangaata

SEQ ID NO: 490 - DNA, 229 bp, Homo sapiens
  misc_feature 8, 9, 11, 12, 15, 18, 22, 25, 28, 31, 35, 36, 37, 40, 41,43, 46, 48, 51, 54, 61, 69, 83, 89, 94, 97, 153, 165, 167,168, 171, 189, 199: n = A,T,C or G
aggtacanngnnacntanttcnttnttnccnaacnnnaanntngcngntgntgntggtgtnatatgtgnacttactccgctgncgaccnctcanggntatatccaaatcgaggccatttatcagcgactgagtcaggacgcttatctatatantttaaccccctncnnccnaaaccattgacgccatgnatgggttatncgcagtgaccgacaaccgaattcgctctat

SEQ ID NO: 491 - DNA, 361 bp, Homo sapiens
  misc_feature 3, 8, 12, 14, 15, 18, 20, 24, 32, 33, 34, 103, 110, 149,152, 177, 196, 208, 213, 218, 221, 224, 229, 255, 256, 262,265, 292, 312: n = A,T,C or G
acntactnggtncnnctntnttangagggtgnnnatggacaccactccaggtcttgatgctctaggtatctcaccttccatccacacatgttcacgtgggtcncgactanaattcactctatagagacacacacagatgtaggccttgntgntcttgaatgcttctcaattactgantggcgggataacatgagcntactccgaggangggcntggcnttntgngctcnaccctaggtactgacaagattggatnncctccnccnaacacccaattggttgtaaatgcgctntagaactagtggatcccctngggctgcatttaattcgatatcaagcttatctattaccaactaacctat

SEQ ID NO: 492 - DNA, 461 bp, Homo sapiens
  misc_feature 124, 125, 139, 163, 166, 168, 171, 207, 216, 237, 251, 254,288, 305, 314, 317, 328, 355, 356, 374, 402, 404, 414, 418,436, 439: n = A,T,C or G
acgcccgggcaggtacttttttttttttttttttttttttccctatcgatctctttaaatttttaggccaattttgagtagtcaaagtcagagcagtcaatctgtgttgtgagccgaggcacanntgcaaaagcgtgtntgaggtgtccggtggaggtggcanccnanctntgggactaatcaccgtgctggggacggcaccgtgtnaggatgcangcagatccctgcaaaagtgtntaaaattcacactnctnttctggagggacgtcgatggtattaggatagaancaccaggggaccccacnaacggggtngtngaaacagcacnccttattttgcccacttgggaggggcnntgacaccaagaaaaccanattttttgttttttcacgggggggccantntacacgtttntgtnttgggccttgggccgctntanaactaaggggatcccccgggct

SEQ ID NO: 493 - DNA, 607 bp, Homo sapiens
  misc_feature 24, 53, 230, 330, 443, 450, 454, 494, 504, 516, 519, 552,564, 571, 582, 584, 595, 597: n = A,T,C or G
gttctgagcctcagctgaccatantgctcatgccaagtcctgagcagggcatnttgaatggtggttccctcatgactacatacaccgttagggaatgtttcgttaagaggaaatcaagatgttctaacctgtgaaggtagaatagattccaggctacacaaacacatgaagtgtgccttatattgattactaaagaggttgctgccaagactgcttccaaagggcagaanatagccctaaaaaatgtttgcagtgtggaaatgcatttttaataagtcatattctagtaacaagttgcatttggtaagacacaaagaaacaatgttggtntgcagagtagaaatctctggaagatgatattgtcatatcagagatattgtcagtatcaggagataccttgaaatctctggaaagatgatttttttgtctcacatatggcattncacaaantaanaatgcccaaaaacttgcaaaaattcacccccgtacctccnggcccgcttnttagaaacctanttngggatccccccggggcctgccagggaaatttcnattattcaaagnctttatnggataccccgntnctacccttccnangggggggggc

SEQ ID NO: 494 - DNA, 735 bp, Homo sapiens
  misc_feature 229, 230, 269, 278, 322, 330, 345, 355, 365, 366, 381, 385,392, 416, 418, 442, 454, 478, 483, 487, 499, 506, 509, 510,515, 549, 552, 565, 566, 567, 580, 591, 597, 602, 620, 622,624, 633, 639, 642, 659, 672, 693, 698, 700, 714, 731: n = A,T,C or G
cgcccgggcaggtgcgagaatgaagactattctcagcaatcagactgtcgacattccagaaaatgtcgacattactctgaagggacgcacagttatcgtgaagggccccagaggaaccctgcggagggacttcaatcacatcaatgtaagaactcagccttcttggaaagaaaaaaaaaagaggctccgggttgacaaatggtggggtaacagaaaggaactggctacnngttcggactatttgtagtcatgtacctcggcccgaggtncttttgctntctgcctttgccaatatttactttggatcttttgttttttgccntttatttngttttttgcctctgntttaaaacangcctaatttnngaaagggcaataagngaangcttgcnagtaatacattgctgaaaaatgcnanttcaccagaaaaatcaagcaattngattttctttangaatgaagtgcctagaagttggtnctgtnggcnattcagagggtnaaaaatnganntaacnaatggggccagggacttcctgccttggatggacntanattccaaacaccnnnttttgaaacactnggattttcaanaccacnaccanatggatgataaaatggantngntttaccacnccttantancaccaccaacaacctanattgtgggttagnccaaatggaaaaagagaaacntggtnantacttcctttgggntgctaaattgggaaaanaaaa

SEQ ID NO: 495 - DNA, 658 bp, Homo sapiens
  misc_feature 550, 561, 586, 606, 633, 634, 640, 643, 649: n = A,T,C or G
aggtacaacaggcttcagatgttactatagataatcacaaggaacactgcgcttggggcatgactgccctcagcaacccttctggcggcagacacagttgttagttttccaacatcctgctttcatgagaacagttttctgtttgctcatatagccttcagtggtatactgagttggtcacgaccttcattctttcggcctgtaacatctccccatttttgtttttgcattaattgaataaaggtaattgcaggttgtgcagctctcaattgccgtttggtggtccagctgattttgcagacttatatcagctgtcagcagactcgtcgcagggtttctcattctcgttcttcttgtcagtgtcagtttctctgctccagcagaccttcactcacgtccctgtcctaggtgccagttgtcgctgttggttgttatgggagtgaacgaagggggatgaatgcagaacgaagacaaagacaaaaagtatttttggaagaaaggggtcagggggctccttctagtgaacaaggggccccccgcgtacccttgnccggcgggccnttctagaactagggggatccccccngggcctggcagggaatttcnaatattaaaagctttatttgatacccnntccganccnttgaanggggggggg

SEQ ID NO: 496 - DNA, 150 bp, Homo sapiens
  misc_feature 48, 56, 68, 87, 88, 109, 113, 114, 122: n = A,T,C or G
ccgcggtggcggccgcccgggcaggtacgcggggaggtggtggcgaancgctcctncgaaaggtttcngaagctggtggtagctagnnaagataacgctgcgttagggnatanngctttttnatgatggaactccgattgaaagcaagtt

SEQ ID NO: 497 - DNA, 267 bp, Homo sapiens
  misc_feature 110, 111, 113, 131, 134, 136, 145, 146, 147, 148, 149, 161,193, 196, 198, 211, 213, 214, 218, 219, 222, 229, 233, 238,244, 247: n = A,T,C or G
gggcgaattggagctccccgcggtggcggtcgcagaagagaatcccgttggtcttgctgtgctggatgaagaaaaggaaggggtggtcggcgcagaagcgggggacgaannanggcacaccgcatcaccanaanancagtttttnnnnntgcagcctccgngccttcctcattgacctccacaaaagacttgngcnanaaacctttggaanannaaannagntcttgcntggnaccanttccantanaatttcttgccctttgccca

SEQ ID NO: 498 - DNA, 25 bp, Homo sapiens
  misc_feature 1: n = A,T,C or G
nttcctcccacccttagggggaaaa

SEQ ID NO: 499 - DNA, 189 bp, Homo sapiens
  misc_feature 42, 67, 101, 106, 119, 127, 160: n = A,T,C or G
accgcggtggcggccgaggtacctgtcttggcctcctacagncctttttacttattttgttttttanaatagagacagggtcttactatgttgctcagacnggttncaaactcctaggntcaagcantcttccagcctcagcctctaaagtgctgggatnacaggcatgagccaccacacccggccaag

SEQ ID NO: 500 - DNA, 35 bp, Homo sapiens
  misc_feature 21: n = A,T,C or G
accgcggtggcggccgaggtncttttttttttttt

SEQ ID NO: 501 - DNA, 83 bp, Homo sapiens
  misc_feature 61, 80: n = A,T,C or G
ccgggcaggtgtgcgtgtgtggagtaaaatgcatcggacagtgattgactccacttttgantgagatgtggaggcggtantgg

SEQ ID NO: 502 - DNA, 86 bp, Homo sapiens
  misc_feature 15, 32, 34: n = A,T,C or G
aggtacacacagttnaccacaaaacaggcctntntgaaaaagccattgccatggactgccatacagacaatgacaagacacaaata

SEQ ID NO: 503 - DNA, 123 bp, Homo sapiens
  misc_feature 3, 4, 11, 12, 14, 16, 17, 18, 19, 35, 38, 45, 56, 59, 60,64, 67, 76, 82, 84, 87, 91, 93, 100, 101, 104, 107, 109: n = A,T,C or G
acnngccaggnncntnnnngcctattacacctacntgnctctggncttttatttgnacnncgangangtggatctngaaggngnganccantncttgcgnnaantgncncatgagaatctcga

SEQ ID NO: 504 - DNA, 291 bp, Homo sapiens
ctccccgcggtggcggcccgcccgggcaggtaccaccatgcctggctaatttttatatttttagtagagacggggttttgccatgttggccgactgatatcgacctcctgacctcaggtgatctgcccgcctcggcctcccaaagtgctgggattacaggcgtgagccactgcgcctggccaagattagaggttttatactttgtatcatccaactttgaaattcttgcttgctggcaccttggcaaacctactgcctgacacatgtgagtgggtttctaaaaatttttgt

SEQ ID NO: 505 - DNA, 235 bp, Homo sapiens
  misc_feature 15, 16, 201, 202, 207, 208, 227: n = A,T,C or G
atagggcgaattggnnctccccgcggtggcggccgcccgggcaggtactagctactctggaggctgaggcaggagaatggcgtgaacccgggaggcagaggttgcagtgagctgagatcacaccactgcactccagcctgggcgacagagagaggctccctctcaaaaaacgaaacaatgttcttggctgggcgccaacanntttannacctgttaattcccaagcnggtaccct

SEQ ID NO: 506 - DNA, 22 bp, Homo sapiens
ctccccgcggtggcggccgccc

SEQ ID NO: 507 - DNA, 420 bp, Homo sapiens
  misc_feature 4, 8, 10, 11, 36, 42, 46, 52, 116, 119, 120, 121, 123, 154,186, 211, 224, 226, 228, 232, 235, 244, 269, 318, 326, 333,344, 345, 366, 368, 374, 390, 405, 418: n = A,T,C or G
aggnactntnntttttttttttttttttttcctganatgcgngtgncctatnaactttcgatggtagtctccgtgcctaccatggtgaccacgggtgacggtggaatcagaggttntannncngagagggagcctgagaaacggctaccacatncaaggaaggcagcaggcgcgcaaattacccantcccgacccggggaggtagtgaccnaaaaaaaaaaaangnangganaanacaagggtncctcggcccgctctagaaactaagntgggatcccccgggctgcaagggaaattttcgaatattcaaaggctttnttcggatnacccggntcggacccttnnaggggggggggggccccgggntncccccnaggcctttttttgggnttccccttttttagnttggagggggggntt

SEQ ID NO: 508 - DNA, 696 bp, Homo sapiens
  misc_feature 14, 53, 124, 286, 323, 349, 351, 388, 415, 423, 431, 434,444, 455, 489, 492, 493, 500, 502, 511, 514, 515, 516, 518,525, 538, 550, 553, 558, 559, 560, 563, 565, 567, 573, 577,580, 585, 589, 599, 600, 601, 602, 618, 620, 626, 633: n = A,T,C or G
  misc_feature 636, 640, 641, 643, 644, 650, 657, 658, 659, 662, 665, 667,669, 676, 692, 696: n = A,T,C or G
gctccagccccganccctggacatctactctgccgtggatgatgcctcccacnagaaggagctgatcgaagcgctgcaagaagtcttgaagaagctcaagagtaaacgtgctcccatctatganaagaagtatggccaagtccccatgtgtgacgccggtgagcagtgtgcagtgaggaaaggggcaaggatcgggaagctgtgtgactgtccccgaggaacctcctgcaattccttcctcctgaagtgcttatgaaggggcgtccattctcctccatacatcccnatccctctactttccccagaggaccacaccttccttncctgggagttttgggcttaagccaananataaaagttttttatttttcctcttgaaggggaaaangggcttcttttttcctgggttgttttncaaaaaanttaaaagnaancccctttttnggattgttttncttggggggaaaaaaaaaaaaaaagcccttttgntannggggggntnaaaaaaccngtnnntngaaaaangtttttttttttntttttttttttnggnttggnnnaanancntttttntttnaanctttnccgngggggggggnnnntttttttaaaaaaaananggggcnccccccnccngggnngnnggggangaaaatnnntanttntngngtttttnttcccccccccccccncccn

SEQ ID NO: 509 - DNA, 638 bp, Homo sapiens
  misc_feature 15, 21, 170, 185, 189, 247, 291, 293, 304, 313, 315, 323,324, 327, 336, 344, 349, 350, 365, 369, 376, 379, 386, 390,391, 392, 394, 401, 405, 406, 407, 409, 410, 411, 415, 437,439, 440, 441, 442, 443, 466, 478, 483, 484, 497, 509: n = A,T,C or G
  misc_feature 510, 511, 519, 528, 553, 554, 557, 560, 566, 582, 584, 589,591, 595, 598, 599, 610, 622, 626, 627, 630: n = A,T,C or G
taaaactttattaanagaatnttatcagtcaaatttccagattaagaataacgttcttggtttcagtcttcatttgtcttgcttgaaacctatggttgcgcatcacctgcttccagcactttagtgagatcaaaagtgggcataataccctccctgacatcaggaccatntccaggctcatcctntatnttaagcagagccagttcctgttgaaaagcttccatgtcaggcccttgaaaagcaggcnctgcttgattttcaatctccccactaggggcaatacccggattntnagtggggggtnccttttttngncgtttttnnctnaggggggcncggggcanttccnnatcccccccgggggngggnaaaaacnttnggggaantttnnntnttttttnaagnnngnnngggnaaattttttttttaaaaaaagncnnnnnttttttttttccccccccggggntttttttttttnggggnngggggaaaaaaanaaaaaaaaaggnnngggggggnaaaaaaaanaaaaaaacttttttttttttttttnnaanacnttttgngggggagccccccccntnttatntncttnggnnggggggggggnttttaaaaaaanaaannaancccccccc

SEQ ID NO: 510 - DNA, 566 bp, Homo sapiens
  misc_feature 388, 440, 483, 489, 497, 509, 539, 550: n = A,T,C or G
atatagggcgaattggactccaccgcggtggcggccgaggtacgcggggacggagggcggtgcccgcgtcagtgaccgaaggaagagaccaagatgaatacagagcccgagaggaagtttggcgtggtggtggttggtgttggccgagccggctccgtgcggatgagggacttgcggaatccacacccttcctcagcgttcctgaacctgattggcttcgtgtcgagaagggagctcgggagcattgatggagtccagcaagatttctttggaggatgctctttccagccaagaggtgggaggttcgcctatatctgcagtggaagagcttccagccatgagggactaacatcaggcaagttcctttaatgcctggcaaagcacgttncttgttgggaataccccatgacacttgtcatttgggccggcccgcttctagnaactagttgggatccccccggggcttgcagggaatttcgaatntcaaanctttatcngaattaccccgntctgaaccttcgaagggggggggcccccgngtacccccaanccttttttggtttccc

SEQ ID NO: 511 - DNA, 624 bp, Homo sapiens
  misc_feature 436, 447, 467, 472, 480, 500, 523, 552, 561, 573, 602, 605,610: n = A,T,C or G
aggacatagccccagaagggcggactggccggagtccagggatggcagccaacgccccataacagagatcagcattggactacaagaagaggcaaggagaaatcaaggatcaaaatttaagtaaaagaaaagtcaagtcattaaaaatagccccctcattgaagagtgggaacgtaggtgtgatgttctggcataaggagtgaaaaaagaaaaagctctattacttgaagcttttcaccaggggcagagagaatggccggaagtgagaaacgtgtgtgtggatgcttacaccgatgccgtctcctaatattggaacatggcttccagaaaggagaaccaattattcctaattccacgggcggcatcctctgactcccaaactcccaaagtggagggcaagagctgcccttaccttgaggaagcttcagagtgtttntggtaaaactntttccgggggtgcgacatanggatncttttcanagctcccttggacaatggtncccttgccccggggcgggcccgnttctaagaaactagtgggattcccccccnggcttgganggaatttccatnttccaagcttttttcgaatacccgtcccnaancctcngaaggggggggggc

SEQ ID NO: 512 - DNA, 238 bp, Homo sapiens
  misc_feature 119, 126, 128, 138, 141, 155, 160, 186, 190, 204, 218, 219,221, 231: n = A,T,C or G
gaattggagctccccgcggtggcggccgaggtacttttttttttttttttttttttttttggttttttttttttttttttttttttttttttcctttgggcaacactttattgggaaanatttacncncggggacctntcntaggccaagcgatnaaaanagggccccaggagccctggggtcccnaggnggctcaaatggaanccatgggacggccnntntaaaactagnggatccc

SEQ ID NO: 513 - DNA, 616 bp, Homo sapiens
  misc_feature 227, 303, 456, 505, 506, 510, 511, 515, 526, 550, 554, 583: n = A,T,C or G
aggtacgcgggagggttctggtgtttggtttcttcattctttactgcactcagatttaagccttacaaagggaaagcctctggccgtcacgcgtaggacgcatgaaggtcactcgtggtgaggctgacatgctcacacattacaacagtagagagggaaaatcctaagacagaggaactccagagatgagtgtctggagcgcttcagttcagctttaaaggccaggnacgggccacacgtggcttggcggcctcgttccaagtggcggcacgtccttgggccgtctctaaatgtctgcagctnaagggcttggcactttttttaaatataaaaaatggggtgtgtattttttaatttttttttgttaaagttgatattttggggtcttctgttggacaattcggggggtggatcctgttctgcgctgtgtacctgcccgggggcgggcccgccttntaggaaacttaggtgggatcccccccgggggcttgccaggggaaatttnngatnntcanaggctttattncgaatacccgttccgaacccttcngaangggggggggggccccggggtacccccaancttttttggtttcccccttttaaagtggagggg

SEQ ID NO: 514 - DNA, 620 bp, Homo sapiens
  misc_feature 40, 41, 56, 62, 65, 67, 68, 71, 74, 80, 214, 219, 293, 315,404, 429, 449, 477, 532, 552: n = A,T,C or G
ccgggcaggtacttggaaaacttgttgaagatgatggggnngggaagggccaccanaaaaanaanannttnttnttcttntgctggcgatgagctttcccgccaaggtgaccgggtgggtgtctccatagcccacagttgtcatgctgatggtggcccaccaccagcagatggggatgctggtgaggctggatgtgtggtcatctttctccacngagtngataagcacagagaaaatggaaatgcccacagagagggaagagaagccaggaagcccaactttcatggttagcntgtgtctccagtgtggccaccntagaagacccggaaagtcctacccgagtgcccgggccaagccttttagaattccgggaaaatcctcattaaagcccgttagggatctgngacccacccttgccccatgttctcnaatatccctcactctctttnctccttgggtggtcttacagccccaacngttggcataggaaaggggaaataattagaagacaaaagttcaaatggatggttcnaacagggttttttttcccangaaattttctttttggacaaagggaagccgggccaagcccaaggccccgggaccgggcaaagcctccc

SEQ ID NO: 515 - DNA, 750 bp, Homo sapiens
  misc_feature 273, 479, 570, 571, 577, 582, 602, 635, 636, 653, 665, 669,673, 677, 688, 694, 723: n = A,T,C or G
acgcggggatacaagaaagaggaagagaagcaggaagattctacatacaggctggctgtgtttcccctggggcatgctcctgtttactggtcccatgccaggttgactcattgcctcgttcatgggtggaattaaaatgcctacctggggaataaatagagcaaggctgggtgctcacctccacagcggcttccttgatccttgccacccgcgactgaacaccgacagcagcagcctcaccatgaagttgctgatggtcctcatgctggcggncctctcccagcactgctacgcaggctctggctgccccttattggagaatgtgatttccaagacaatcaatccacaagtgtctaagactgaatacaaagaacttcttcaagagttcatagacgacaatgccactacaaatgccatagatgaattgaaggaatgttttcttaaccaaacgggatgaaactctgagcaatgtttgaggngtttatgcaattaaatatatgacaagcagtctttgggattttattttaacttttctgcaagaccttttggcttcacagaaactggcagggnnttgggnggagnaaaccaactaccggatttgnttgcaaaacccacaccctttctcttttctttannggcctttttgacctacnaaaacttacaangaanaaanttgntggaaaacctngctttncatggttttattttaaattaaaattggangggcaaaaaaaaaaaaaaaaaaaaaaa

SEQ ID NO: 516 - DNA, 422 bp, Homo sapiens
  misc_feature 24: n = A,T,C or G
ccgagggtacttttctgagacttnatcctcgaggcctggtgggctaccggctcttttcatcttcacggccacccacagaaatgaagcagagtggcctaggctcacagtgcacagggctgttcagcaccacagtgctgggtggctcctccagtgccccgaatcttcaggactacgcccgcagccatggcaaaaagctaccacctgccagtctgaagcaccgagatgggtttgaagggtgttccatggtgcctaccatctaccctctggaaacactgcataatgccctttccctacgtcaagtgagtgaattcttgagtagagtctgccagcgccacactgatgcccaggcacaggcatctgcagccctctttgattccatgcacagcagccaggcctcagataacccattttctccaccacgt

SEQ ID NO: 517 - DNA, 322 bp, Homo sapiens
  misc_feature 39, 45, 165, 172, 175, 208, 322: n = A,T,C or G
aggtactttttttttttttttttttttttttttggttgngtaatnctttatttgaaaaaatgaaaagtgcacacacacacacacacatacacacacacacacacacacttacataggcacaggataatctggaagtatgaccagcaaatgataactgattccctnagggganaanaaactgggtggctgaaggacaggaatgagaaanaaggacagttgcgcttgtttgtatcgtttgaaattgtccagtgtgtatgtgttcttttcaaatgtttgaagaaccattggctcccttatcaaaatgtaaataccaaggaaaatn

SEQ ID NO: 518 - DNA, 746 bp, Homo sapiens
  misc_feature 2, 5, 327, 541, 563, 568, 590, 597, 605, 618, 620, 626, 631,643, 650, 658, 676, 680, 683, 684, 686, 694, 707, 716, 718,720, 728, 741: n = A,T,C or G
gnggnggcggccgcccgggcaggtacgcggggggcggcggcggagagagctggctcagggcgtccgctaggctcggacgacctgctgagcctcccaaaccgcttccataaggctttgcctttccaacttcagctacagtgttagctaagtttggaaagaaggaaaaaagaaaatccctgggccccttttcttttgttctttgccaaagtcgtcgttgtagtctttttgcccaaggctgttgtgtttttagaggtcctatctccagttccttgcactcctgttaacaagcacctcagcgagagcagcagcagcgatagcagcccgcanaagagccagcggggtcgcgtagtgtcatgaccagggcgggagatcacaaccgccagagaggatgctgtggatccttggccgactacctgacctctgcaaaattccttctctaccttggtcattctctctctacttggggagatcggatgtggcactttgcggtgtctgtgtttctggtagagcttctatggaaacagccttcttttgacagcantctaccgggctggtggtggcangggtntgttttggtcctgggagccatnatcgggngactgggngggacaagaatgntntaattnagggnggccccaccctngggtggngggtaccncgggccccatataaaaanaaanggnnanccccccgngggggggggaaantttaaatcnangnctttcccnccccccccccccnggggg

SEQ ID NO: 519 - DNA, 607 bp, Homo sapiens
  misc_feature 128, 211, 308, 388, 417, 459, 462, 491, 521, 534, 538, 541,557, 558, 567, 576, 577, 579, 586, 591: n = A,T,C or G
ccgggcaggtacgcgggaggcatgcaccaccacgctcgactaatttttgtatttttagtagagacggggtatcactatattggtcaggctggtcttgaactcctgacctcaggcgatctacccgcctngacctcccaaagtgctgggactacaggtgcccaccaccacgcttggcttattttttttgtatttttaggagagacggggtttnaccgcattagcgaagatggtctcgatctcctgacctcgtgatccacccgcctcggcctcccaaagttctgggattacaggcttgagccactgcgccnggcctagaaccctgcttctcatataagatgggcctgcacctacctctggcatgtttttctttgtgtatttcccgtttttnatcctgtaactaaatgctcattatttaanaacactccagttacttttccctttaggcctggcaaaactttnctntttcttttttttttttttttataaactgnaacctttggggcgggttttagaaaactaantgggatccccccngggnctngaaggggaaatttggnnttttcaaanctttaattnnantacccgncccancccccaaggggggggg

SEQ ID NO: 520 - DNA, 641 bp, Homo sapiens
  misc_feature 3, 38, 258, 314, 412, 635, 639: n = A,T,C or G
tgnacctccaccgcggtggcggccgtttgagaagccancgctcacccacccggggtctctgtgcattgacctttgggtgctgacttggagaaaagcacaaacacgaccagtcccatcctggctcccgtggggcttcttctatctacgcattgtatcgactgcattagttggactaagatgatgactcagttaaaggaggagacaaatgctgactgtctaagcaagaatggcccaagctggcaagaaaaagcacactgngatacatagggatacaggaagggcaggagcctttttgcctgccgggatctaacaancatttacattttgttttgcctgccaaacctatcaagaagggatttcttgtttgggcccagggggagtctccacttggaaacaaaacaaaaaatggcangtcaaaaaagttctttgaggtgtccctattccaagccagcccaagaagtcctcaatcccgtcatcccacggggaagaagttccttttgaaggggaaagcatgaaaagttccagcctcatggcctcttgccttattgggtcaattttcttcggggaatcacttgtgaatcaatgaatatctttcatttacctctgccgggacccaccccatggtttcaaggggnggcntt

SEQ ID NO: 521 - DNA, 304 bp, Homo sapiens
  misc_feature 9, 28, 68, 69, 76, 94, 113, 116, 201, 232, 244, 278, 285: n = A,T,C or G
tgtactaanccattgtgacagaaacttnctttaccattgatgagctggaagaactttatgctcttttnnaaggcantaacatctcaccagctgntactggggcgggagcagcnacncgctggaccggcatgaccccagcctgccctacctggaacagtatcgcattgacttcgagcagttcaagggaatgtttgctcttcntctttccttggcgcatgtaggaactcactcntgaccgtttcanggccttccgctttgttccagttttatttaggatnaaaaatnggaggacctcttttggatt

SEQ ID NO: 522 - DNA, 362 bp, Homo sapiens
  misc_feature 16, 21, 25, 97, 101, 104, 112, 135, 137, 147, 148, 149, 153,154, 157, 162, 164, 167, 171, 173, 182, 189, 203, 204, 212,232, 245, 247, 279, 292, 297, 301, 309, 311, 321, 341, 346,351, 352, 355: n = A,T,C or G
aggtacccgggatttnaccantgtnactgtgctaaatggttctgtcttcctcagtgtgatggagaaagcccagaaaatgaatgatactatatttggnttcncantggaggancgctcatgggggccctatatcancngtattcaggnnntatnngcnaacantnatnaccnancctactggnaacttangagtggattgcctnnccctggtncacgcactggtagtctacgntgtccgcaatggntnaaaacttggaagtctcttgagcccaggaggcnataaagtcccaanacttncctnatctgccnanttataccttnatgcctggggcaacacaacnagacntgccnnctnaaaaaaa

SEQ ID NO: 523 - DNA, 287 bp, Homo sapiens
  misc_feature 267: n = A,T,C or G
ccgggcaggtacaacactctgtccctacaagggcacaggtgccaccttgagcagctgtgactatgtctaaggccatccggttttgcatcaccaccttcctgatctgatcaaactcatcaattaacaaaaggagggcagctcaggtgtaattcatgggcccaatctctgtgttctgcaagggctgtaacctgcatttctacagtgatgacacctgttccagggacagttattgctaaggggtagaaccactaggggctcaatgcactnacaaaaactgggaacacagc

SEQ ID NO: 524 - DNA, 369 bp, Homo sapiens
  misc_feature 25, 34, 69, 218: n = A,T,C or G
ggggcaggcttgccatgggttttgngacaccccnatccaaagctcaccatgttgcatcccgcccattgnctgtgggaccccaagtttctagccatgtccagttcttcacaaaagctggatgcacatgccaaggcaagccatccacagctgctgctggaagggtggtgcagatctaacagttggagacattggccacctcagcataggtgtgagcccantccacaatgttgttggagcatgccaacctgtggctgagcaaataactcccaagaatttggcagacaattttcggcccttggaccttggatttattgatggcccaactgcacactgccaaatgctgtcacaagaggggcaccaccacttcta

SEQ ID NO: 525 - DNA, 570 bp, Homo sapiens
  misc_feature 420, 452, 496, 516, 522: n = A,T,C or G
aggtacgcggggaagcgcaaaagaagaaagatgaggcagaggtccaagtaaaccgctagcttgttgcaccgtggaggccacaggagcagaaacatggaatgccagacgctggggatgctggtacccgtgcccaggaggacgccgagctccagccccgagccctggacatctactctgccgtggatgatgcctcccacgagaaggagctgatcgaagcgctgcaagaagtcttgaagaagctcaagagtaaacgtgttcccatctatgagaagaagtatggccaagtccccatgtgtgacgccggtgagcagtgtgcagtgaggaaaggggcaaggatcgggaagctgtgtgactgtccccgaggaacctcctgcaattccttcctcctgaagtgcttatgaaggggcgtccattctcctncatacatccccatccctttactttcccaagangaccacacccttcctccctggagttttggcttaagcaacaaganaaaagtttttattttttctnttgaangggaaagggcttcttttttccttgcttgttttcaaaaatttaaaaagg

SEQ ID NO: 526 - DNA, 785 bp, Homo sapiens
  misc_feature 59, 61, 62, 65, 66, 68, 69, 80, 81, 83, 101, 274, 303, 353,366, 386, 440, 448, 450, 454, 470, 494, 495, 496, 498, 510,514, 517, 523, 537, 557, 558, 561, 598, 606, 613, 615, 618,624, 625, 636, 637, 643, 645, 648, 654, 665, 668, 673: n = A,T,C or G
  misc_feature 676, 681, 696, 702, 722, 732, 740, 745, 747, 748, 751, 757,769, 781: n = A,T,C or G
agctccaccgcggtggcggccgagctgacgcaaacatgcagatctttgtgaagaccctngnnggnngnnaccatcacccnnanaagaaaatccttttgacnccattgagaatgtcaaagccaaaattcaagacaaggagggtatcccacctgaccagcagcgtctgatatttgccggcaaacagctggaggatggccgcactctctcagactacaacatccagaaagagtccaccctgcacctggtgttgcgcctgcgaggttggcattattgnagccttcttcccccgccagcttgcccagnaaatacaaactgcgaacaagtatgattctgccgcaaagtggctattgctncgccttcaccctngtgcctgttcaactgcccgnaaggaaagcaaagttgttggttcacacccaaacaaacccttgcggtcccaaggnaagtaaangntcanaattaaagggttggcntcttttccttttgaaaggggacannncncttcctggcccncagngcnccccgntgggccccctgggnaacccttccaaattaaaaannggnttcccttttttcaattttggaccttgggaagccaagnctttctanatagaananatngtatcnntcacatattannatacgngnttncccttngggccccgatnttnttaanaanacctnaagtggggattcccncccggngccttgcgaagggaatttcngaaatatttnaaaagccnttaantnnganttcccnggtccgaacccntcccgagggggngggg

SEQ ID NO: 527 - DNA, 644 bp, Homo sapiens
  misc_feature 118, 293, 296, 305, 321, 331, 334, 339, 341, 343, 350, 353,359, 365, 370, 371, 375, 377, 391, 397, 402, 409, 423, 425,427, 433, 448, 456, 476, 480, 481, 487, 496, 507, 512, 513,516, 518, 521, 524, 527, 534, 539, 552, 554, 561, 587: n = A,T,C or G
  misc_feature 593, 595, 597, 598, 601, 606, 607, 608, 610, 612, 614, 620,623: n = A,T,C or G
agatacgcgggggaggagtgagctcttggggtgtccagttggttgccgcggcaagtctctccgagcagcgcatttgtcttctaggctgcttggttcgtgcctccgagaaaggggtctnctgctgccagctaagtgtgggagaacttgtgcacgtatctcccctccgaatcccaacgatgggtaacgccagctttggctccaaggaacagaagctgctgaagcggatgcggcttctgcccgccctgcttatcctccgcgccttcaagccccacaggaagatcagagattaccgngtngtggtagtnggcaccgctggttgtnggtgaaaaantanctgcncntnggccggncgnttctanaactantgganncccngngctgcatgaattcnatatcnaagcnttatttnattcccgtcgaccntntntagggnggggggacccggatncccccaanaatttttgtttccccttttnattnnaggggntttaatatncacctcctatngggcnnctnantcnttngtncaatttncttgntcctcctcgttgntnaaaaatnttggatattattgtttcccccccctntatganancnnacnaaaannnantnantttaantantttttttttttttttttcccc

SEQ ID NO: 528 - DNA, 515 bp, Homo sapiens
  misc_feature 31, 346, 386, 436, 437, 450, 451, 454, 470, 486, 489, 490: n = A,T,C or G
aggtacgtccaaatgacgaagtcactgcagngcttgcagttcaaacagaattgaaagaatgcatggtggttaaaacttacctcattagcagcatccctctacaaggtgcatttaactataagtatactgcctgcctatgtgacgacaatccaaaaaccttctactgggacttttacaccaacagaactgtgcaaattgcagccgtcgttgatgttattcggggaattaggcatctgccctgatgatgctgctgtaatccccatcaaaaacaacccggttttatactattggaaatcctaaaggtaggaataatgggaagccctgtcttgttttgccacacccaggntgatttcctctaaagaaacttggctgggaatttctgctgngggtctataaaaataaaacctttctttaaccatggctttcttccaaaaannaaaaattgtaatnntanataaaaataatggggncccttgggccgcttcntannaaacttaaggtggggatcccccccc

SEQ ID NO: 529 - DNA, 590 bp, Homo sapiens
  misc_feature 308, 430, 434, 446, 447, 472, 480, 482, 487, 496, 535, 536,582: n = A,T,C or G
aggtacgtccaaatgacgaagtcactgcagtgcttgcagttcaaacagaattgaaagaatgcatggtggttaaaacttacctcattagcagcatccctctacaaggtgcatttaactataagtatactgcctgcctatgtgacgacaatccaaaaaccttctactgggacttttacaccaacagaactgtgcaaattgcagccgtcgttgatgttattcgggaattaggcatctgccctgatgatgctgctgtaaatccccatcaaaaacaaccggttttatacctatttgaaatcctaaagggtagnaataatgggaagccctggtctgttttgccacaccccaggtggattttcctctaaaggaaacttggctgggaatttctgctgtggtctattaaaaaataaaacttcttaacatgctttctccnaaanaaaaaaagaggnnaaaaaatatacaaagggttaccttngggccggntnttaanaaactaagngggaatcccccggggccttggcaagggaaatttccgatnnttccaaaggctttattccgaataccccggttcggaacccctttcgnaggggggg

SEQ ID NO: 530 - DNA, 822 bp, Homo sapiens
  misc_feature 54, 55, 122, 288, 344, 349, 350, 385, 394, 404, 419, 421,426, 430, 449, 469, 479, 488, 503, 539, 551, 554, 571, 601,611, 627, 635, 647, 648, 662, 664, 667, 669, 672, 673, 676,678, 679, 691, 701, 705, 709, 711, 715, 717, 721, 730: n = A,T,C or G
  misc_feature 741, 747, 752, 753, 759, 766, 768, 776, 795, 798, 801, 806,819: n = A,T,C or G
tccaccgcggtggcggccgcccgggcaggtactcggggaggctcctggggtggnntccaaatcactcatttgtttgtgaaagctgagctcacagcaaaacaagccaccatgaagctgtcggngtgtctcctgctggtcacgctggccctctgctgctaccaggccaatgccgagttctgtccagctcttgtttctgagctgttagacttcttcttcattagtgaacctctgtttcaagttaaagtcttgccaaaattttgattgccccttcccgggaagctgttgccngccaagtttagggagttggaaagaagattgcacgggatcaagattgtccctttcangaaanngaaggcctcattttggccgggaagttccttgggtngaaaaaatnattttgaaangaaaaatggttaagntngttgntggnaccaattggttaaaaaaanacctttttccaatccccctngggtttttcncaacttggntcctttttcaaattngaacaacccccttggattcctttcaaccttggccangaaaaatggttnaanaaggggtttttccaaancggttcttttggctttttaaaattaaaaantccacctttnggccttctttcccccnagatgaantatggaaacaannaagaaaatttactntnttntntannaangnnggtttccccttntgggtcccgntttnttanangaancnttantgttgggantcccccccccnggggcnttggnnaagggnaaatttntngaatattncaaaggcttttattccgantanccngggcnctaccccttcaanggg

SEQ ID NO: 531 - DNA, 768 bp, Homo sapiens
  misc_feature 36, 38, 53, 57, 289, 372, 413, 422, 526, 537, 538, 545, 547,552, 560, 570, 585, 587, 602, 612, 614, 633, 635, 648, 657,666, 701, 708, 724, 749, 759, 760: n = A,T,C or G
aggtacaaacccagtttgttttcaaaaaatcacagngngcaatgcaactcatnactntataaaagcaagcttaggctacctgaaagattttcccttggaagtttagcgtatgtttgactaacaagaattccctacatcagagactctaggtgctatataatccaaaaacttttcagcctgttgctcattctgtcccatgctggcaataataccttgtcagccctttacccttattttggaattgctccatctcctggtggggacttggtatcttgtctgccatatcagnaacacaatacccctgaaggaggttctgatttgatttttttttttttcttcatgcctaccctttttttgggaagttttccagcncgccaatttttgaaaattgaaaaattgacaaagggtggtantattttggnttccaaattttgtcaattttccccaacccatttggcaattttaccaaaccctttctttaaacctttaaaaatggggggttaaaccccccttaaagggccaattntttcaaaaaannaaaggcnangaacnttggccanttgaaattanaaaaccggggaaaantntgaaaaaaaaaaaanggaaaccctnanccattttttatttttttgncntttttaaagccanttccctttnacttttttnaaccccttttttattgaagaaatttggaagaagtngggaacntttacaatttttcccntttttttttaaccatttttttccgnaataccttanntttttttt

SEQ ID NO: 532 - DNA, 476 bp, Homo sapiens
  misc_feature 27, 31, 35, 36, 50, 55, 56, 251, 391, 401, 446, 475: n = A,T,C or G
ccgggcaggtacccgtgcccaggaggncgcngagnnccagccccgagccntgttnnttttactctgccgtggatgatgcctcccacgagaaggagctgatcgaagcgctgcaagaagtcttgaagaagctcaagagtaaacgtgttcccatctatgagaagaagtatggccaagtccccatgtgtgacgccggtgagcagtgtgcagtgaggaaaggggcaagggatcgggaagcctgtgtgactgtcccncgaggaacctcctgcaattccttcctcctgaagtgcttatgaaaggggcgtcccatttctcctccataccatccccatccctcttactttccccagtagggacccacacccttcctccctgggagttttggctttaaagncaacaagatnaaggttttttatttttcctctgaaaggggaaagggcttctttttncctgctggttttcaaaaaaaattaaaaang

SEQ ID NO: 533 - DNA, 421 bp, Homo sapiens
  misc_feature 400: n = A,T,C or G
ggagctccaccgaggtggcggccgaggtacgcgggaacatcaaactgttaatcgaatgcaggctccagggagaagcaacttcctgggtatgcgtgttaagagacaaaaaatgatgacgtttgatgaccactccaccagaaaagggaagaaagcctgaggggactacgtggacctccctaaacacactgcgcatgctccattccaaacggtatggcgagcactgcgcatgcgggaaacccaccctgtaagggaagaatcctgggaaagaggcgagcctatgaagtcccaggatcaaggttagagaccctttttttactgtcttcttgtgctctcttttctctcttggaccttcaggcgcctgcttgggtctctttcaagcgaattttgctttctttcctgntctaaagccttttaactaaac

SEQ ID NO: 534 - DNA, 421 bp, Homo sapiens; identical to SEQ ID NO: 533
  misc_feature 400: n = A,T,C or G

SEQ ID NO: 535 - DNA, 668 bp, Homo sapiens
  misc_feature 39, 55, 58, 67, 103, 114, 187, 265, 266, 304, 307, 318, 330,358, 359, 366, 377, 379, 380, 388, 405, 406, 435, 438, 461,466, 498, 499, 500, 509, 521, 532, 536, 562, 570, 578, 583,584, 586, 616, 633, 637, 639, 640, 647, 652, 654: n = A,T,C or G
  misc_feature 656: n = A,T,C or G
ggtggcggccgaggtacgcggggaggctcctggggtggngtccaaatcactcatnganaagagaaanctgagctcacagcaaaacaagccaccatgaagctgncggtgtgtctnctgctggtcacgctggccctctgctgctaccaggccaatgccgagttctgcccagctcttgtttctgagctgntagacttcttcttcattagtgaacctctgttcaagttaagtcttgccaaatttgatgcccctccggaagctgttgcanncaagttaggagtgaagagatgcacggatcagatgtccnttnagaaacgaagnctcattgcggangttcctggtgaaaataatttgaagaaannttttgtngagaccatgtnannaacttttnatcctggtttccactgnnttttcaatgacaccctgatcttcaactgnagnaatgttaaggttttcaactgttntttgnttttaataaaattcactttgctcttccaaaannnaaatatttngtttttttcccnccccttacttntagngtaccctgccccgggccgggctccgntttttaanaacttagnggggnntncccccccggggcctgccagaggaaattttntattttaaagcctttantccntnnccaggcngaccntngnggggggggggcc

SEQ ID NO: 536 - DNA, 668 bp, Homo sapiens
  misc_feature 16, 45, 69, 86, 89, 92, 102, 112, 152, 159, 164, 165, 166,225, 245, 261, 267, 271, 272, 276, 280, 290, 302, 303, 323,351, 366, 392, 411, 416, 437, 438, 457, 467, 480, 483, 486,521, 524, 529, 534, 540, 548, 550, 556, 562, 578, 584: n = A,T,C or G
  misc_feature 585, 602, 606, 610, 612, 613, 622, 629, 644, 648, 649: n = A,T,C or G
ccgggcaggtactcgnggggcaaggtcatccctgagctgaacggnaagctcactggcatggccttccgngtacccactgccaacgngtnagnggtggacctnacctgccgtntagaaaaacctgccaaatatgatgacatcaagaaggtggngaaacangcgtnnnagggcccactcaagggcatactgggctacactgagcaccaggtggtctcctatgacttnaacagcgacacccactcctncaccttcgacgctggngctggnattnncctnaacnaccactttgncaagctcatttnntggtatgacaacgaatttgnctacatgcaacagggtggtggacctganggcccacatggcctncaagggagtaagacccctggaccacnggccccagcaagagcccangacgnagagagagaccctcactgctnntgaagggcgtgccacactnagttccccancaaacttgaattnttnccnttctcacagtttgcatgtaaaccccttgaaaaggngangggtntaaangagccntacctttntnattttncctttnggccgggttttaaaantaggtnngattcccccgggccttngaangaantnntaattttcnaaccttnaaccgaattcccggnttgnnccctaaaaagggggggggg

SEQ ID NO: 537 - DNA, 637 bp, Homo sapiens
  misc_feature 216, 268, 310, 342, 350, 379, 409, 425, 431, 443, 492, 532,562, 591, 595, 598, 609, 636: n = A,T,C or G
aggtacaaacccagtttgttttcaaaaaatcacagtagcaatgcaactcatcactctagaaaagcaagcttaggctacctgaaagattttcccttggaagtttagcgtatgtttgactaacaagaattccctacatcagagactctaggtgctatataatccaaaaacttttcagcctgttgctcattctgtcccatgctggcaataataccttgncagcccattacccttattttgaattgctccatctcctgggtggggacttgtnattcttggtctgccatatcaggaacaccaaacccctggaagnaggttctgcatttggattcttttaggtggggntcttccanggccttacccctttttttttgggaaagtnttccaggcccgccaatttttggaaaaatgnaaaatggaccaagggnggtatntttttcggaatncaaattttttccattttcccacccaatttggccatttaccaaacccttnttaaactttaaaaatgggggttaaaccccttaaaagggcnattaattcaaaaaagaaaaggccagggacnttgccattgtaataaaaaaccggggaaanttanganaaaaaaaaaangaaaacccttaccaattttaatttttng

SEQ ID NO: 538 - DNA, 822 bp, Homo sapiens
  misc_feature 40, 43, 58, 59, 61, 71, 74, 195, 216, 278, 376, 385, 393,458, 482, 515, 539, 543, 569, 582, 588, 592, 627, 631, 638,640, 644, 664, 665, 688, 710, 716, 733, 737, 742, 745, 747,748, 763, 765, 800, 808, 811, 815: n = A,T,C or G
aggtacgcgggatcaatgacatggtcacggaaggcaagtnggntgacttcaacggaannantatctccttnctnaactgggaccgtgcacagcctaacggtggcaagccgagaaaactgtgtcctgttctcccaatcagctcagggcaagtggagtgatgaggcctgtcgcagcagcgaagaggtacatatgctnagttcaccatccctcaatagngtctttctccaatgtgtcctccaagcaagatttcatcattaaccttatagggtttcatgaanctctaaaggatcaaaggttaaaaaattcataaaatttttttacttttatttaaaaaaaaatttgccaaaccaccaaaaggaatcaaattggttcccanttaggccanaattaatnggaattaggcaattcaaggcccaaaattttttttggccttaaaaccaccaattttttcttttttngggggaatttttttggcccctttncccttgggggggttaaataaagggggggaattncaaggaaaaaattattttggaatncccnattgttgcccacccgcccagaaattnaaaaaaatggggncttttnttgncttaaaaaccaaggacctaaaaaaaatcccttttncttnctcttangncccnttttcttcaaccttttggtnncccctggcccccggggcccgggncccgccttcttaagaaaccttnaggttngggaaatcccccccccngggnccttngtnanngggaaatttccccananttcaaaaggcctttaattcgaaataccccggttcngaaccccntcntaanggggggg

SEQ ID NO: 539 - DNA, 580 bp, Homo sapiens
  misc_feature 13, 101, 278, 292, 304, 316, 339, 350, 353, 355, 371, 417,472, 507, 509, 512, 515, 525, 527, 528, 532, 535, 539, 542,548, 558, 566, 579: n = A,T,C or G
aggtacaatctanttaaacaagcagaatagcactaggcagaataaaaaaattgcacagacgtatgcaattttccaagatagcattctttaaattcagtatncagcttccaaagattggtatgcccataatagacttaaacatataatgatggctaaaaaaaataagtatacgaaaatgtaaaaaaggaaatgtaagtccactctcaatctcataaaaaggtggggagtaagggatgctaaagcaaaataaatgtaggttcctttttttctatttccgnattatcatggcagnctgcttcttttngataatggcctnaggggttacccccatttttaagntttaggagggnttngnaaattgccaaatggtnggggaaatgaaaaaatttggaattcaaaatatttaccaccctttgntcaatttttccatttttcaaaaattttggccgggcctggggaaaaaccttttctncaaaaaaaaaaaaagggggttaaggggccaattgnancgnaanaataaacacntnntatnttngttncgnaaattncatgaaaacnctttcttntccaagggggggnt

SEQ ID NO: 540 - DNA, 419 bp, Homo sapiens
  misc_feature 315, 323, 352, 411: n = A,T,C or G
aggtacgcggggccgggcgcggtggcgcgtgcctgtagtcccacctcagcctcccatccttgtctacctaattaggctttgtgtaactcagtgttgcaaagcttttgacatctgtttgagttaatgtttatatatgttgttacttaagggtttcacattaaatttaaacatacttatattttataaccaaacaagtcatattggggcatactcattaggattgagtgctttcttacaccaaaatacatgtatacaaaagatttaaaacacttttcggcccgctcttagaaactagtgggatcccccgggctgcanggaattcngatatcaaagctttatccgaatacccgtncgaccctcggaggggggggggccccggtaccccagcctttttggttcccctttttagtngaaggggt

SEQ ID NO: 541 - DNA, 597 bp, Homo sapiens
  misc_feature 19, 30, 40, 55, 73, 217, 221, 232, 308, 370, 382, 400, 401,426, 440, 472, 489, 505, 538, 561: n = A,T,C or G
accgcggtggccggccgangtaccatcttncgagatactnattcacgtcaaaatnctcctgcaccggaggatnggggcacttcccaagatgaaatgcttgtccctctgccgcaccgaagaggccagccagtgcggaaagcagcagcagcagcatcaccatcttggggctgggtggctggagaaggaacctggagcttttctttcaagatgaaggcangttntccagatgcanaatcagcccgatttgagatgcctgtcttggtgacctggcctctcccaagctccccgcgatacctgcccgggccggncgctcttaggaactagttgggaatccccccggggcctgcaagggaaatttcggaatatacanaggcctttatcngatacccgttcgaccctnngaggggggggggcccccgggttacnccaagcttttttgngtccccctttttaagtggaggggtttaaattngcggccgcctttgggcngtaaaatcaatgggtncaataagcctggttttccctggtggatgaaaantttggttaatccccgcttccacnaaattttcccaccaccaaaaccataaccggaagccc

SEQ ID NO: 542 - DNA, 787 bp, Homo sapiens
  misc_feature 207, 223, 246, 306, 315, 325, 328, 439, 448, 470, 487, 488,491, 494, 502, 519, 537, 538, 552, 555, 559, 560, 565, 582,595, 608, 630, 673, 675, 696, 710, 721, 724, 726, 727, 729,734, 739, 751, 756, 758, 761, 762, 769, 770, 773: n = A,T,C or G
ccgggcaggtacacaagagtttgtcagacaaataaaataagaatacttcacacacgtatcaacaccatacaaggcattattcttcacacagtaacatctaatgtgttcttttatttttgaaacagcaggaaaagagccctttcccttcagaggaaaataaaaactttatctgttgcttaagccaaactccagggaggaaggtgtggncctctggggaaagtanagggatggggatgtatggagganaatggaccgccccttcataaagcacttcagggaggaaggaattgcaaggagggtttcctnggggacagntcacacaganttncccgatccttgcccctttccttcactgccaccacttgcttcaccggccgtcacaccatggggggacttggcccattacttttctttcttcaataagaatgggggaaacacngtttttacntcttggagccttttttttcaangacttttctttggcaanncgnctntcgaaatncagcttcctttcttcgntgggggaagggccaattnnaattcccaccgggncanggannttagnaattgtcccaagggggncttcgggggggcnttggggaagcctncggccgttcccttccttggggncaacgggggttaaccctttcgggccccggtttcttaagaaaantnagtggggaaatcccccccccngggccttggccaangggaaatttcngantnntnaaagnccttnattcggaataancccgntnccnnacccttnnaangggggggggggccc

SEQ ID NO: 543 - DNA, 718 bp, Homo sapiens
  misc_feature 310, 331, 389, 401, 431, 543, 565: n = A,T,C or G
aattggactccaccgcggtggcggccgaggtacagaacccgaccaaagtaggctggtgaggaagtccaggctccaggggaacagacgctgcccagtgttcatagcttcctgcaacttgacagagcctgagtttgcctcttagtgggagaatgagagagagctgtagtgtcacctgacattccccaaaccttgtgaagcacgttggcctaagtgtgccgtgatcccagcccacactagcctgggtgcatctgctaatgggagaccaaatctttgtcccgggaagcaagaagtgggtggggagtaatcgagncggcccgcccgggcaggtacngcggggatgattctgagggagccggtgaagccacccaccagggaggcatgaaaaatgnaaaagggacagnggcctgaccagacagtccttgacaagaggnacgaagaaaaaaaagaaactcgaaaaacttggcctgcaatgggatttgggaactacaggaaggataagcttgagaaaattcagcccaaaagggggcttgactgtcatttggnagccggtgggcacttgttaaangaagccagcccatcaccattgatcctgttttttcaccacttcacttggaaaggacaccatttttatataccccaagggggcgggaaaagttaaaaactttactattttcatttaaaatgttttgacaccaatttgggaaattggtctttttaa

SEQ ID NO: 544 - DNA, 200 bp, Homo sapiens
  misc_feature 9, 20, 21, 26, 28, 32, 43, 50, 52, 54, 57, 67, 68, 70, 78,87, 109, 118, 151, 190, 197: n = A,T,C or G
aggtacccngggaccagtannttggnanacantgccttctgtnttctcgngngngcncttgctccanntnctgttcanggccagccntggcaccctgctcctggttctntgcctgcanttgggggccaacaaaatgctcaggacaacactnggaagatcataataaagaattttgacattcccaagtcantacctgncag

SEQ ID NO: 545 - DNA, 170 bp, Homo sapiens
  misc_feature 46, 58: n = A,T,C or G
ctcccacacttttgtatccctttaacatagggactaaatgctcccnttggtcgtaaancatggggtcatattcttgtaatcatgtgggcttttcttttacttaaattttgatccttgatttctccttgcctcttcttgtagtccaatgctgatctctgttatggggcgtt

SEQ ID NO: 546 - DNA, 621 bp, Homo sapiens
  misc_feature 44, 45, 68, 113, 278, 294, 318, 319, 363, 474, 483, 517,523, 527, 549, 554, 578, 614: n = A,T,C or G
ccgggcaggtacgcgggagggtggcccaactggaccagctcctnnactacaggaagaagtcagctgantttccagacttctatgattctgaggagccggtgagcacccaccangaggcaagaaaatgaaaaggacagggctgaccatacagtcctgacagaggacgagaaaaaagaactcgaaaacttggctgcaatggatttggaactacagaagatagctgagaaattcagccaaaggggctgactgttcattggagcggtgggccactgtttaanaagcagccatcacatnatctgtttttccaccacttcactnnaaaaagacacccatttatataccccaaggggccaggaaagtaanaacttactatttcattaaaatgtttggaccaccaatttgggaattgtcttttaattttcttgtccaagaaatggcttatttggaaaaatgtgaaattgccattggactttngtagccatnattttcttttttctgccaaaaattatgaccattnatttanaccnttggcctttattgaccaaattnaaccntggtgccttaacttggcctttttnggggaaaaaaaatgtttttggttcctttaaaatttngggaaaa

SEQ ID NO: 547 - DNA, 700 bp, Homo sapiens
  misc_feature 36, 308, 329, 478, 494, 504, 525, 528, 575, 585, 610, 611,613, 623, 632, 643, 649, 653, 656, 662, 668, 676, 678, 680,684, 685, 686, 692, 694: n = A,T,C or G
aggtacaaacccagtttgttttcaaaaaatcacagnagcaatgcaactcatcactctagaaaagcaagcttaggctacctgaaagattttcccttggaagtttagcgtatgtttgactaacaagaattccctacatcagagactctaggtgctatataatccaaaaacttttcagcctgttgctcattctgtcccatgctggcaataataccttgtcagcccattacccttatttttgaattgctccatctcctggtgggacttgtatcttgtctgccatatcaagaacacaaaccccctgaagaggntctggatttggattttttttntcttcatgcctaccctttttttggaagttttccaagccgcaatttggaaatggaaatggacaagggtgtattattttggatccaaatttttcattccccaccattgcattaccaaccttctaactttaaaatggggtaaccccttaaanggccattattcaaaangaaagccagnactgcattgaataaaaccggnaanattaagaaaaaaaaaaggaaccctaccatttttattttttgggcttntagccaattncctttaactccttaaaccttttttnntnggaagaattnggagaaggnggggacctttnaccaantttnccncttttntttaancatttttncntntatnnnccttantntttttt

SEQ ID NO: 548 - DNA, 700 bp, Homo sapiens; identical to SEQ ID NO: 547
  misc_feature 36, 308, 329, 478, 494, 504, 525, 528, 575, 585, 610, 611,613, 623, 632, 643, 649, 653, 656, 662, 668, 676, 678, 680,684, 685, 686, 692, 694: n = A,T,C or G

SEQ ID NO: 549 - DNA, 473 bp, Homo sapiens
  misc_feature 18, 56, 90, 150, 193, 329, 332, 369, 386: n = A,T,C or G
agtttcagaacgacgganagctcccgcgtgaggctgctgcccctcctgggcgccgncctgctgctgatgctacctctgtcgggtacttgnttttttttttttttttttttttttaaatttgttcactgaccaactggttgttcaggagcncgttgtttaatttctggatatttatgaattttctgaaattccncctgattgatttctagcttcaaactgaaaatatatttgatataatttctatctttcttaattttactgaggcttgttttgttttctaacatatgatctatcctggagaatattccatatgcaattgagaaaaatgngcnttctgttgttggattgaatattctggatatatctacnagtctttttagagttanattactacctttctctgttctcatcttaacatcatcatgatggacatttttatttcatgatcaatggattttctctcatcaaataaa

SEQ ID NO: 550 - DNA, 211 bp, Homo sapiens
  misc_feature 1, 6, 46, 71, 83, 98, 100, 119, 128, 144, 145, 157, 160,165, 169, 173, 175, 177, 178: n = A,T,C or G
nccggncaggtactcactatgtgaagtctaccaagctcgtgctcangggaaccaagacgaatagttagaanaaaaagagcatnaaaaataaaaaaaananaaaaagtactctgcgttgntaccactgnttcccgggactctgcnntgttaccactgnttnccggnactntgcntngnnaccactggttcccgggactctgagttgatacca

SEQ ID NO: 551 - DNA, 851 bp, Homo sapiens
  misc_feature 5, 14, 15, 30, 35, 100, 167, 200, 231, 258, 261, 292, 301,303, 328, 339, 343, 371, 378, 411, 418, 512, 514, 529, 542,551, 573, 591, 595, 607, 608, 609, 634, 644, 663, 664, 673,676, 677, 683, 702, 706, 721, 724, 731, 739, 741, 743: n = A,T,C or G
  misc_feature 758, 766, 780, 783, 785, 786, 787, 800, 802, 804, 809, 816,821, 826, 829, 840: n = A,T,C or G
ccggncaggtactnnttttttttttttttnttttngactatttattcactatggcaattccagtgccttgagtgatgcctggcttatcatgggagctcancacataacaaatgcatacatgaatacggattctccctctcaccccaatcccttgggatatgctctantatccactgactcctactctcctggctgcctgnaaaggtaggcatgcccaccgatgtcgctgancagcatgaccttggtgttggcagggangtnctgcttgaagactggacgctgctcctctccnattagtgtntnggggtgcccaaaaacatccaacacnttggcaggtgncggntcaaacaaatgaaaccaacctttagcantaactgncacaaacaggttctttcctttattacacacgtncccaacnccaacgcaagtcagcattccctggcaggaacagggtgaaccaagggcccgactgtcatcattttttatacacagacacctttcccgctggtgtntnccaccaccaggttcntttaacgtatcgntatttaacngtttcctaggcaaaattgcttnccgggaaagaaagctttnctgnttgaaatttcannnggccacgccgcttgaacgtaagctnaaattgaacnttatggggcaccttccaannaaaccaaanggnngccggnaaggcccccaaaaaaaaantttnccttgaaacctttcnggnggggaanccccccgnanancttgggcccgttttnaaaaaaantggggaatcccccnggngnnngggggaaattccnananaaaanggttttntaaanacccnggnaacccttttanggggggggccc

SEQ ID NO: 552 - DNA, 416 bp, Homo sapiens
  misc_feature 42, 44, 82, 83, 109, 113, 138, 155, 169, 187, 204, 215, 217,326, 405: n = A,T,C or G
aggtactggaggcatgtgccaacacacctgtctaatttttgngntttttgtagagacagggaaatcactaacagttactctnnataactacttgttaagttaacctacnaatnaaaaatggcatgaagcttttactgncggggggaagttttcanatgttactacaacnttaagcccaataccttgngagagaaaccaacatanattgcacacanancttatttgcaaagtgcatatggtctaagaggcgataggatatgcaaaataaccataatgtaggatagaaaataaggatgtattaaggagcacacatgaaatcctattanagttaagagaaggtagatagagctcacttgttttcagatgtggtggttcctaaatcttgagacaggagaaaaatagatnggcttagggat

SEQ ID NO: 553 - DNA, 473 bp, Homo sapiens
  misc_feature 67, 69, 70, 109, 123, 124, 125, 132, 135, 150, 151, 158,160, 163, 165, 166, 171, 174, 180, 186, 187, 188, 192, 207,210, 213, 216, 224, 225, 230, 231, 236, 239, 240, 242, 243,253, 254, 258, 264, 277, 283, 284, 285, 287, 288, 301: n = A,T,C or G
  misc_feature 302, 306, 313, 318, 319, 320, 327, 329, 335, 338, 355, 357,358, 362, 364, 372, 375, 380, 382, 389, 394, 395, 404, 419,423, 429, 431, 451, 458, 470: n = A,T,C or G
aggtacttttttttttttttttttttttttttttttttttttttttttttttttttttttttttttngnnttttttttttttttttttttttttttttttttttttttntttttttttttttnnntggaaancanatttttttttaaaannaaaaccntnaancnntcccnttntaccanaaaaannngggnggctttaaaaaaaanggnaanccncaaaaaannttttnnatatnccnnannaaaaattttnnaaantttccnacaaaaatttccnaataannngnntttttttaaaaannaaanttttagnggggnnnttttccncncaaaangtngtgttaaaaaatttttnanngggncnaaaaattnggnaaaantnaatattntaaannggtgtttanaaaaaaaaaaaaaanttanaaaaancnaaaaaaaaaaaaagaagggngaaaaanataaaaattttnacc

SEQ ID NO: 554 - DNA, 679 bp, Homo sapiens
  misc_feature 8, 16, 496, 546, 550, 552, 588, 596, 605, 634, 637, 657,662, 664, 665: n = A,T,C or G
aggtactnggggttgnttagcagaggccggaagcggtggtttttagcggctctctgggtagcagggtggtgtgatagcggcagcgaggggctcggagaggtgctcggattctcgtaactgtgccgggacttaaccaccaccatgtcgagcaaaagaacaaagaccaagaccaagaagcgccctcagcgtgcaacatccaatgtgtttgctatgtttgaccagtcacagattcaggagttcaaagaggccttcaacatgattgatcagaacagagatggtttcatcgacaaggaagatttgcatgatatgcttgcttcattggggaagaatccaactgatgagtatctagatgccatgatgaatgaggctccaggccccatcaatttcaccatgttcctcaccatgtttggtgagaagttaaatggcacagatcctgaagatgtcatcagaaaatgcctttgcttgctttgatgaaaaaacaactggccccatacangaagattacttgagaaaagctgctgacaccatggggggatccggttacanaatnangaagtgggatgaactgtacccttgccccgggccggncgttttanaaacctagngggatcccccgggcctgccagggaaatcnaanattaaaaccttatttggatnaccgntnnacctttaaaggggg

SEQ ID NO: 555 - DNA, 319 bp, Homo sapiens
  misc_feature 2, 9, 15, 18, 48, 55, 63, 64, 65, 66, 75, 79, 82, 86, 87,88, 89, 94, 95, 154, 167, 168, 171, 174, 179, 181, 193,195, 214, 222, 228, 298, 299: n = A,T,C or G
anctccgcnggcggngcncccgcggcagggacacacgagcatcaaggnaacaggnctgaggannnnaaacgactntgtnatnagannnnagaannaatattgctcacacctgctacaccttcttgggagccaagggaagccttttctgcaatcnccccattttgatnnaanctnatcancnatggcttgggcnancaaaatatttaaaggtctntttcccanctcttncacttatctactacataaggctatagcaattaaaaagtctttcctttcctgccgccgtaccatgggtccnncttgggtagcaacttagtgg

SEQ ID NO: 556 - DNA, 483 bp, Homo sapiens
  misc_feature 235, 267, 441, 460, 461, 462, 473, 480: n = A,T,C or G
aggtacgcggggtggcgaaacgctgtctctactaaaactacaaaaattagctgggcgtggtggcgcgtgcctgtaatcccagctactcggcaggctgaggcaggagaatcgcttgaactggggaggtggaggttgcagtgagccgagatcacacaactgcattccagcctgggtgacagagggagactccgtctctaaaaaacaaccccccccccccaaaaaaaaaaatgcatancaagctgtaatgctctttgtgttttagaatantagaggtctggaaagttgtttgcttttccccagtttttttttgctgtgttacctctgaagggaattgaggtagaggggagagttagaaggaatattcggcttttctattttatatcctcctaggtgaaatttttacaacaaacatgtacctgcccgggcggccgaggtactttntttttttttcttatttgcnnnccactttttgnatttggnaat

SEQ ID NO: 557 - DNA, 746 bp, Homo sapiens
  misc_feature 555, 576, 591, 600, 644, 650, 651, 654, 665, 675, 687, 724,734: n = A,T,C or G
cgcggtggcggccgcccgggcaggtacgcggggatagccgtttgagggaagaaggaggaaaattacccggtatcgttagagctacaccaaaattgcattgagccaaacttgccaccaagagcccaacaatcaccatgatgctgagcacggaaggcagggaggggttcgtggtgaaggtcaggggcctaccctggtcctgctcagccgatgaagtgatgcgcttcttctctgattgcaagatccaaaatggcacatcaggtattcgtttcatctacaccagagaaggcagaccaagtggtgaagcatttgttgaacttgaatctgaagaggaagtgaaattggctttgaagaaggacagagaaaccatgggacacagataccgttgaagtattcaagtctaacagtgttgaaatggattgggtgttgaagcatacaggtccgaatagccctgatactgccaacgatggcttcgtccggcttagaggactcccatttggctgtagcaaaggaagagatttgttcagttcttttcagggttggaaattgtgccaaatngggatgacacttgccagtggnacttttaaggggccnaagcaccangggaaagccttttgttgcagtttttgcttcacaagggagaatanccttannaangcctttaaagnaaaccccaangggaaaagaaantatggggccccaaggttaccctttgtccgcttcttanaaacctaggngggattcccccc

SEQ ID NO: 558 - DNA, 664 bp, Homo sapiens
  misc_feature 4, 82, 237, 255, 256, 342, 363, 405, 415, 528, 529, 530,533, 541, 553, 557, 582, 600, 601, 614, 621, 630, 631, 634,641, 643, 651, 658: n = A,T,C or G
aggnacctctcggaggggccctcctcctgctccatggggatccgcagcgccagccggccagggtttgaattagtcattgttnggaggatacaaatagatgaagatgggaaggtttttccaaagctggatcttctcaccaaagtcccacagcgagccctggagctggacaagaacagagccatagaaactgctcctctcagcttccgaaccctggtaggactgcttggaaatctgaanctgctctggaaagccctnnataaaatccgctttgttgcaagagggaggaacaactagttccaaaaacagttggaacgttggtaggcatgaaagcatgcttgccgntgggagggaacatgtcaaatntttattcaattattaaaacattttgctatttttctgcttagnaaaccacacnccttggaagaccgtgcctgtctatggcagatttatgggcaccattattatgggaaactcttcatgacatggaaaaaattaaataccaactagtttaagttataaaaatgccannntgnctttactnataccacctggngctnaaattatggatcccttttaccaacntcccccgcccctttaaanntttttttaaaaanaacaaanggttccccnntgnccggggncntggggccnttttttnaaaaaa

SEQ ID NO: 559 - DNA, 427 bp, Homo sapiens
  misc_feature 398: n = A,T,C or G
ccgcggtggcggccgcccgggcaggtacctgttttgtttcctgattattccaggattctctcactagaccctaagcctctcattctgctgtaggtcagattctctattccttctccctagcccagagccttgccagcacttgcgaaagttacggttagaatgttcccttgcctagtcacctctttgaaaaaaacactgtgatgttacatgactgcgattcaaatcagacactgtctgcttcccacatgtatctcagacaggttttatttaatgtttcttgtcagaatattgtaaattcaaaaggatgactttaaataaatgtaaacaaagacaaacttgtggtctttttgtctggaattactttcacaagagatggagcttgcaggggaatttactgnctgaccagttactaatggtgagcccttgc

SEQ ID NO: 560 - DNA, 426 bp, Homo sapiens
acgcggatctttcccaactttaaatactcttttagtttctatagggaaggaagagttattacaggttttttttttaattattctttaactttagatactgccaatctgatttaaaattctccaagcttaattctgtgcaacaaacagaaccacacaagcagccaggcactgtggctcactcctataatcccagcatttttgaggctagatgggaagatcacttgatctcaggattttgagaaccatccggacaacatagggagacctcatcgctattttaaataattttaaaaagaaaagaaaaaaaaaggccaaagtgctgggattataggcgtgagctaccgcgctcggccattatatctagattttgaaacctcatgtttgtttaccaagtagtaacaggtgtaccagcagcttccaggaata

SEQ ID NO: 561 - DNA, 411 bp, Homo sapiens
  misc_feature 7, 8, 133, 134, 146, 258, 274, 296, 323, 335, 336, 350, 355,368, 375, 401: n = A,T,C or G
ccgggcnngtacgcgggaagtgcggggcaggacaaagggctctttgcacagcagggaggcaatgttggtgggggaggggcaggaggtaggaaaggcaagaggaggaggttcttttccctgggagattattcanntttggcatacanttaaagaaatcatttttagttcccactcaagcattgaatttttgccaaccacatactattaaccccaaatttgatacatttcagaatatcttgtagggatccattctcgccntaaaaaaaataataanaaaaaaaggtccctcggctcgntctagaactagtggatcccccccgggntgtaggaaattnntatatctaagcttnttcgnataacccgctcgnacctttnaggggggggccccgggttccccaaanttttttggtt

SEQ ID NO: 562 - DNA, 845 bp, Homo sapiens
  misc_feature 86, 96, 134, 145, 158, 181, 188, 192, 225, 255, 284, 298,354, 359, 365, 370, 373, 386, 392, 400, 409, 426, 465, 490,504, 509, 518, 522, 523, 539, 548, 560, 567, 571, 581, 583,589, 590, 606, 610, 623, 630, 644, 686, 697, 711, 720: n = A,T,C or G
  misc_feature 725, 727, 732, 733, 742, 746, 750, 751, 755, 758, 759, 761,769, 775, 778, 779, 780, 786, 787, 792, 793, 795, 796, 803,804, 809, 810, 811, 830: n = A,T,C or G
ccgggcaggtactttttttttttttttttttttttttttttttacgttaaaaaaagttttatttagggagctccagggaatgcggngggaaagganaggtgcagtgtcattgccgccctctcctcccacctagngcattaatagnggatgggagcatntgacagaagtgagatcaggcagngggtgtntgcnccccacagcgcatgttggctggaacagcaaagnctatctgctgaggtttaggcaagttcaggntgcccatgattttgacaaactcctcacanctgagggtgagccnagggttcaaagtccttttcttctccacgggggacactgtgaacccatggtaatcgngagcngggtanatcanacngcctcctggaagngtgaanatcttttnatggccccnagtggtgcaaggtcttngcacaaccttgcttggaagaacttccgcccacccccacngatcaaacaggggcatcttccaatnaaagcccattcttntgggncattttcanggannaaaaggggacaccaanccttggggntggtggcccaangggggtnggcnccttggttcntnccaacnncggaaaaacgcccccnaaancgggattgggagntctcccntcccccaaatgggntaaaagttcaaccctgggggccccccctaaaaggccgggaanaaacccccccntccccttgggccgntttttgaanaaaantngggtnnccccccggncttntaannaaanttnnanttttcacncttttnaannncccccnnccccnnannggggggnnccccnnnccccccccctctttttttncccttttgggggggg

SEQ ID NO: 563 - DNA, 617 bp, Homo sapiens
  misc_feature 4, 30, 70, 101, 104, 114, 115, 308, 421, 424, 456, 494, 541,547, 569, 574, 593: n = A,T,C or G
cgancgggcaggtacttttttttttgttgnttttttttttttggcttatcacacctgattttctacagtnagcataagttgcacatggataataacacacnttnttaaaaggcnnaaacaacaactatgatcacaatttaaaggcagaaaagtgctattatcttaacagaacatggaacatccatgttctatgataataataaagttaggcaaagttaatatcaaataacctgatattcaatagcctagtttttaattagttttagtaacacatatggaagaatctgttatgaataaaaaaccatgtnggccgggcacggtggctcacgcctgtaatcccagcactttgaaaggccaaggcaggcagaccacgaggtcaggagttcgagaccagcctggccaacataagtgaaaccccgtnttntactaaaaatacaaaaattagcccggcatggnggcttgtgcctgtgatgccagctacttggggggctganggaggaaaatcacttgaactttggaggcggaaggttgcaatgagacnagaatnggggccctgcccttccaaaccntgggngacaggaaccaaggacttncattttccgggggaaaaaaaaaaa

SEQ ID NO: 564 - DNA, 452 bp, Homo sapiens
  misc_feature 44, 46, 50, 58, 79, 84, 86, 103, 104, 109, 118, 122, 124,128, 136, 139, 144, 149, 153, 157, 202, 204, 213, 218, 224,230, 244, 251, 254, 255, 262, 265, 271, 272, 274, 276, 279,287, 293, 294, 298, 303, 314, 318, 319, 344, 352, 354: n = A,T,C or G
  misc_feature 355, 366, 367, 373, 375, 384, 388, 389, 403, 435, 436, 439: n = A,T,C or G
aggtactttttttttttttttttttttttttccctatttctcangntttnattttcanactttgctaattactttcttntaaangncttcattttcaatgaannttttntagccattntcantntttntgttttancanacccntttanattnttcncatttagcatagcaaatgttatatttaattttatttcttgacccncntaaggttcntaatnaaccgnatgggnttttggttaccccntttttanaanngtattanccnatttgnnananttnttacccancccccnnttgntaatntggagacttangacnntccaaaaaaaggtataccctcattntgagggcncnncaaaaacccanntttttncntttatttgnaaannaaaaaggtaaccanttttccccaattcaaggaaagacttggggggnnaanattttcccggccc

SEQ ID NO: 565 - DNA, 750 bp, Homo sapiens
  misc_feature 121, 125, 134, 230, 334, 375, 408, 428, 487, 520, 530, 559,562, 585, 587, 590, 636, 649, 651, 658, 669, 689, 694, 698,709, 711, 715, 717, 719, 736: n = A,T,C or G
aggtactttttttttttttttttttttttttttatgagatggaatcttgctctgtcacccaggctggagcatagtggcatgatctcagctcactgcaacctccaccttccgggttcaagcnactnttgcgcctnagccacccaagtaactgggactacaggcatgcacctccacgccctgctaatttttatatttttagtagggatggctttcaccatgctggccttaantgatccgtccgccttggcctccaaagtgctgggatttcaggcaagcgttaccacacccgacccctcactagtatttcagcattaatgttccctctttaaccagngcttattatgagtatacacaaacaacattgcctgacataanaacaagttgaacccacagtggaatccctacagnggcagacagtggcagctganagtgacagaccaacggggggaaaagccacaagccatctcctgtaagcttcactgccatnacctgagctcatggcacacacctgctttacctntaagcgaggngctgctctttacattaccactctgggaanaancaggcccaaccaaaccccaccangncgntttagcttttcaagggaccccaagacacatgtgtataaaaagccanttgcatgtggtgngnggggggnatgaaatatantgccaaatatttaccatggnggganaggngggggggaaantnaggnantntaaaaaaagcttttggngggaaaaagaaaaa

SEQ ID NO: 566 - DNA, 547 bp, Homo sapiens
  misc_feature 329, 330, 331, 332, 339, 348, 363, 364, 374, 379, 397, 413,430, 437, 449, 450, 456, 472, 484, 485, 491, 493, 500, 509,515, 517: n = A,T,C or G
ccgggcaggtactttatatgacttgaatatgttaaaacatatcaaaacttgtttcatggcccagaatatggtctgtattggtaatatgtttcatgtgcacttgagaagaataaattttgctgttgttgagtagtcttctataaatgtcaaccaagttaagttggttgatagtgtttttcatgtctactatatccaggctgactttatgcctacttgttctatcagttattaagagaggactatcgaagtccccaatgataattgtggatttgtctgttattttttgtaagttgtatcagtttttatttaattgattttggaaccttttnnnnctagggncatagaacntttaaggatggccanngtcccctaanttacntgaacccccttttcattnttgaaatgaacttccntgggatctttggtctgnaaagccnttttgggccaanntaaaanaagacgcccgcagcanctttttgggggnnctaggntnaaactanggtatatcntttttncnatcccctttaacctttttaaggaattttgg

SEQ ID NO: 567 - DNA, 182 bp, Homo sapiens
  misc_feature 41, 48, 51, 62, 64, 66, 77, 78, 79, 80, 84, 85, 90, 149: n = A,T,C or G
agctccaccgtggtggcggccgccactctggttttgcatcntcagganacngctcggggccngngngcttctcctannnnaatnnttttntataagtggctcacgccttccatagccacatcatctcggttcgaaatagaaccccatanagaggtaggttgtaggaggcctgcaggtaccta

SEQ ID NO: 568 - DNA, 63 bp, Homo sapiens
  misc_feature 1, 3, 12, 20, 34, 37, 51, 55, 61: n = A,T,C or G
nanggaatttcnatatcaangcttatcgattacncgncgtaccttagaggngggnggcccngg

SEQ ID NO: 569 - DNA, 149 bp, Homo sapiens
  misc_feature 20, 34, 58, 98, 108, 109, 129, 134, 135, 138, 142: n = A,T,C or G
agctccaccgcggtggcggncgaggtacgcggtngcctgcgccctctcctataaagcngacgccgagccgcgctgcgacgctgtagtggcttcgtctncggtttttcnnttccttcgctaacgcctccnggctnncgncagnctcccgc

SEQ ID NO: 570 - DNA, 55 bp, Homo sapiens
  misc_feature 33, 37, 46: n = A,T,C or G
atgcacgaattctgatatcaagctttatcgatnccantttaccttncaggggggg

SEQ ID NO: 571 - DNA, 556 bp, Homo sapiens
  misc_feature 234, 237, 268, 334, 341, 349, 366, 375, 381, 399, 402, 409,428, 433, 461, 462, 466, 475, 517, 519, 525, 544: n = A,T,C or G
aggtactgtttaatcttctccatggggctaacagagtgagtgttaagagcagtgtggccatcctccagctcacttggccgaacactcagctccgggatggttcgaacgaatctggggtgacttattgggagatacttgaatgtcttcatgtctcgcccgccaatcactcgggcagtgaccgtcttcccaaccttcagcttggtagtaggagaggtgccctctggaacatcattntanaatgtgggaggcatggatacagccaaataantgcccatcttccagagttcacaaccacatgggggtaggcctttaaattggaccttggaccagttcnccttgtngaaccaantgtcccccgaatgggangaggggtgntgcttntttatgggtccccttacnagntcaagangcttgggaatccacttttntttcnatcccttcattcaaacctggttcttcannaagnttcctttcntggggttccgggcccttcaatggggacccttctttgggcaantnccgggngcccccctttccaccaagnccccaaaaaagg

SEQ ID NO: 572 - DNA, 881 bp, Homo sapiens
  misc_feature 117, 122, 123, 124, 132, 138, 141, 143, 156, 159, 163, 164,173, 177, 178, 189, 191, 199, 208, 209, 210, 211, 212, 215,216, 217, 223, 234, 248, 253, 274, 283, 288, 289, 301, 307,312, 314, 317, 322, 325, 326, 341, 343, 361, 362, 364: n = A,T,C or G
  misc_feature 370, 374, 376, 379, 392, 393, 397, 399, 403, 408, 409, 416,422, 434, 440, 444, 446, 450, 451, 452, 459, 470, 476, 480,481, 486, 491, 492, 510, 513, 515, 521, 522, 527, 533, 535,541, 559, 564, 566, 570, 571, 576, 579, 582, 584, 592: n = A,T,C or G
  misc_feature 594, 597, 604, 605, 609, 611, 614, 617, 620, 627, 641, 647,654, 660, 662, 668, 688, 690, 691, 722, 731, 736, 737, 754,757, 766, 779, 794, 795, 796, 797, 803, 804, 814, 815, 818,819, 827, 829, 830, 831, 832, 835, 840, 846, 847, 855: n = A,T,C or G
  misc_feature 856, 863, 867: n = A,T,C or G
tccaccgcggtggcggccgcccgggcaggtacttttttttttttttttttttttttttgtttttttttttttttttttttttttttttttttttttttttttttttttttttttttnatggnnnccactttnttgccnaancntggaacttggggnaancctnnaccttcaanaacnngcaaaaaaaangntggggggnttttgggannnnnccnnncccaanggggaaactgnccggggaaattccnaaacngggaacaggggggggtccccntgacccccnaaaanntttttccccccncccttnggggngnggnagggnacnnaaaaaaaaaatggcntnccaggggtttttcccatnntncctaancccncnatnggggccccatttnnaaantncccnggggnngggaaangttttnggaaaacggctncccaanaaantntccnnnccacccnggggttttttnttaaancttnntcccnaaccnntttgcctttttttacccnttnanaaaaannggccnccacangngggggnccaaaaaaaaaataacanaattncngggnnaaaanttnttntngggggggnanatnttttttnntttngncanttnggnagaaaangggaaaaaaggggngctttncccccancttttngnaaaccncctttttaaagggggaaacngnncccccctttttttttttttttttttttcccntttaaaaanaccannccccctttttttttttnccnatttttgcnccccaaatttttncccggttcctttggnnnntttatnnaaaaaaaaannggnncccccccngnnnncgnggganttttgnntttatcannttttttnttcncccccccccccccg

SEQ ID NO: 573 - DNA, 573 bp, Homo sapiens
  misc_feature 84, 154, 270, 327, 353, 357, 389, 425, 443, 460, 473, 488,492, 494, 495, 521, 541, 546, 552, 554, 555: n = A,T,C or G
ccgcggtggcggccgaggtactttttttttttttttttttttttttaaggaaaaggagactggaagaagaaaaataagtatttntggcagaacttccgaaagaaccagaaaggaataatgagacagacttcaaaaggagaagacgttggttatnttgccagtgaaataacgatgagcgatgaggagcggattcagctaatgatgatggtcaaagaaaagatgatcacaattgaggaagcacttgctaggctcaaggaatacgaggcccancaccggcagtcggctgccctggaccctgctgactggccagatggttcttacccaacntttgatggctcatcaaactgcaatgngagnttatcatgtctttgacatcttgatcacctacnccgataagggacagtcttcaccattttagtctttgnatttcttttcgaaacttncgactcgcacctgggtntgcaaaagagggngtcttgttcatatanaatngnntattttctctaccctgacagagactnaattttacagtcaaaaatangggtnatcatncnngggggttttggttttttt

SEQ ID NO: 574 - DNA, 518 bp, Homo sapiens
  misc_feature 6, 33, 55, 90, 133, 148, 182, 186, 191, 235, 258, 270, 299,300, 311, 315, 324, 337, 345, 368, 429, 436, 440, 469, 488,492, 501: n = A,T,C or G
accgcngtggcggccgaggtacaatctacttantcaagcataatagcactaggcngaataaaaaattgcacagaccgtatgcagattttncaagatagcattctttaaattcagtattcaccttccaaagatnggttgcccataatanacttaaacatataatgatggctaaaaaaaataantatnctganaatgtaaaaaaggaaatgtaagtccactctcaatctcataaaangtgagagtaaggatgcttaaaancaaaataaatgngaggttcttttttttttctattttcccgnnttattcaatgncaantcttgcctncttttgataatgncctttaanggggtttacccccatttttaaantttaaggaagggtttggtaaatggcctaattggggttgggggaaatttggaaaaaaatttngaatccnaaanttattaaccacccctttggtccatttttncattttttcaaaaaatttngccnggcttgggnaaaaacctttcccaaaa

SEQ ID NO: 575 - DNA, 369 bp, Homo sapiens
  misc_feature 5, 22, 29, 66, 85, 93, 115, 120, 131, 142, 144, 161, 174,209, 217, 225, 231, 234, 241, 243, 247, 252, 269, 280, 284,286, 287, 290, 296, 298, 299, 301, 319, 321, 344, 364: n = A,T,C or G
ccggncaggtacattccattanttttcantgtcacctaagggtcaaggtttaggggcctgacacantagtgtcactcaggctgtngccccagntgtaaatatcaacaaggaactnttttntcctacccagnggttttgtgtntnctgcagtattcataatntataaaagaatgnttaactgtgaagtgaaatcatatctacaagtcccntacaacantttacttnacaaanacnattattntnccanccctnaactcaaaaaagccacncaaatacttanagtntnnttnccaaantnncncacaagctggtccttgangnacaaaaaggtctttcccaaagangccttgggctcagggaaaangcccc

SEQ ID NO: 576 - DNA, 762 bp, Homo sapiens
  misc_feature 236, 240, 258, 271, 292, 301, 303, 336, 356, 370, 385, 438,440, 442, 445, 460, 461, 481, 482, 488, 491, 493, 519, 523,535, 536, 540, 555, 564, 569, 576, 584, 601, 614, 615, 621,624, 635, 647, 649, 671, 691, 692, 737: n = A,T,C or G
aggtacaatctagttaaacaagcagaatagcactaggcagaataaaaaattgcacagacgtatgcaattttccaagatagcattctttaaattcagtattcagcttccaaagattggttgcccataatagacttaaacatataatgatggctaaaaaaaataagtatacgaaaatgtaaaaaaaggaaatgtaagtccactctcaatctcataaaaggtgagagtaaggatgctanaagncaaaataaaatgtagggntctttttttctantttcagttatatcatgccagnctgcttctntntgatattgcacttaggggttacccattttaaantttaggagtgttgtaaatgncaaatggttggggnaatggaaaagatttngattcaaaattaataccacccttggtcaatatttcaattttccaaaattggcngngnctngggtaaaaccttttnncaaaaaaaaaaagggggttnngggccnttngnaaggaaaaaaaaaaaaaaaaaattcnaaanatttcagtaaanncttnttttttaggggggtnttgggtgtnttctngaattanttgggccnggaactaaaggaaatanccaaagttccccnncccaanggnaggaattgggnaagcccaatttntnaaaaaattaaagggggttaaantgggggccttgaccaagggnnaatttaatttggcccaagccattggggggaccaagaaaattgganccaaccaaggggctttgaaaaaagg

SEQ ID NO: 577 - DNA, 343 bp, Homo sapiens
  misc_feature 68, 75, 76, 77, 87, 88, 89, 90, 94, 95, 96, 97, 98, 103,104, 107, 108, 114, 117, 119, 124, 126, 127, 131, 135, 136,140, 142, 148, 156, 158, 159, 160, 161, 166, 167, 168, 169,170, 171, 172, 173, 174, 176, 177, 178, 182, 200, 201: n = A,T,C or G
  misc_feature 202, 203, 205, 206, 209, 217, 224, 229, 235, 236, 239, 240,244, 249, 250, 254, 262, 263, 268, 278, 280, 281, 283, 292,296, 304, 310, 312, 313, 315, 316, 320, 325, 328, 329: n = A,T,C or G
tttttttttttttttttttttttttttttttttttttttttttttttttttttttttttttttttttnaaaaaannntttttttttnnnntggnnnnnagggnnaanncccccncantnttttnannaaancaannaaananctttcngggggganannnnttttnnnnnnnnnannncctnggggggcaaaaaaaaaannnngnnccntttttttnggggggnccctnggaaannccnnccanggggnntttnaaaaaaanngcccnttttttttancnntntcccccgcnaaanaaaaaaantccccnanngnncccnggggnccnnaaaaaagggggggg

SEQ ID NO: 578 - DNA, 601 bp, Homo sapiens
  misc_feature 342, 372, 387, 436, 441, 448, 482, 501, 520, 538, 554, 569,585: n = A,T,C or G
aggtacacaagtaacctgctttgtctgccctaagcggtgggccctgtccatggcctgctggtccacagtggggttccagtcgctatcatagaaaatcactgtgtctgcagcagtgagattgatacccagtcctccagctcgtgtgcttaacaggaacacaaagatgtcattcctgttctgaaaatcaagcaaccatgtctcgcctctccgagatcttggatgagccatcaagcctcatgtaagtatgcttcctgtaaaccatgtattcctccagtaggtctatcatcctggtcatctgggagtagataaaggaccctatgcccttgagacttgagccgagtnagcaggacatcaaggggcatacaagctttncctgtcagtgatgangcttctccttgcctggaatcctgatgaaaagaaccagcccattcttgangtctnaatgctncacagaaccttccaagctgggcttttggggaaanaaacttggggaatcggtcntattttaagcccagttctngcaagcccaagtttcaangggggcccccattttnaacaaaaaaactggntttgggcttggccaanaactcccttcctttcc

SEQ ID NO: 579 - DNA, 835 bp, Homo sapiens
  misc_feature 309, 377, 378, 439, 441, 493, 514, 614, 615, 649, 671, 688,717, 726, 727, 730, 742, 745, 752, 786, 791, 798, 804, 812,813: n = A,T,C or G
ccgggcaggtaccatagtttttaaacaggaaaaaatactttacttttgactaaaaactggccagaatttctcatacttctcattttagggctttagatctctgcatcccgaagcacaaatttaaatataaaaattagattaactgttcgtatgtctatcagaatcaaagtttttttcctttttaaagatttgtgggttaccctaatataagctagaattttagttttataatttttttcttttttaaaattgagatggggtcttgctatgttgtccaggctggtctcaaactcctgggctcaagtgatntgcctgcctcggcctcccaaagtgctgggattataggcgtgagccaccgcgcccggccaaactagaannttaatatttttcacctcctcccaatcaggtagaacatcaatagactggaagaagatactgntnaagatgtttcttttaacaaaaaatttcacacgccaaaaatttaagatttttnccattattgaagacattattntcaaaaatctttcctataacactttttaggggaagaaggtggaaaaaaataccttaaaaaggtcgcatcttaaccgggggggctcacttgaccgatatannttctttagaatagaaaggtcattcacccccaaanggtctttattaattttaaattnaaggttaaaaacccacnggaggaccctttattaaacaccattttcnccaacctcnnaanggctaatttttnttnctttccnatattccaaaacattcaaaccaaattttgatgantcatncccaatngggctngtaaaaannattgaccccaaaaacttttttt

SEQ ID NO: 580 - DNA, 368 bp, Homo sapiens
  misc_feature 15, 45, 46, 50, 56, 57, 61, 66, 68, 71, 73, 77, 88, 89, 111,117, 119, 123, 125, 132, 135, 136, 141, 142, 143, 144, 147,148, 149, 150, 154, 159, 162, 167, 168, 178, 180, 181, 182,183, 185, 188, 197, 201, 202, 203, 204, 205, 208: n = A,T,C or G
  misc_feature 210, 212, 213, 214, 215, 218, 220, 221, 222, 224, 225, 234,236, 237, 240, 246, 252, 261, 266, 269, 270, 271, 273, 274,278, 282, 283, 286, 287, 288, 289, 292, 297, 298, 300, 301,303, 312, 313, 314, 320, 323, 330, 338, 341, 343, 344: n = A,T,C or G
  misc_feature 348, 351, 352, 353, 355, 357, 368: n = A,T,C or G
ccgggcaggtacctnttttttttttttttttatttcaaaataaannttanaaaaannggcnacctnantgngntttnttttttttttnnaaaaaaccctttttgatttttnaccccncncttngngcaatgntgnnaatannnnttnnnngaanctttnccncccannttaaaaaaantnnnntnccnaaacccccnaaannnnnggnantnnnnggntnnnannccccccccngnnaantttttnaatttnaaaaaaaanggggnttnnncnntttngccnnggnnnnttnaaaanncnnancttttaaannncccccnttngcccccnaaaagggnggnannaaanggnnnangnccccccccccn

SEQ ID NO: 581 - DNA, 774 bp, Homo sapiens
  misc_feature 34, 37, 38, 39, 51, 62, 63, 65, 72, 78, 79, 80, 81, 82, 85,91, 92, 93, 95, 96, 97, 104, 108, 109, 110, 114, 117, 118,122, 123, 124, 132, 136, 141, 142, 150, 152, 153, 154, 155,166, 167, 168, 175, 176, 181, 182, 186, 188, 197, 220: n = A,T,C or G
  misc_feature 221, 222, 224, 235, 236, 247, 260, 261, 262, 267, 285, 315,321, 324, 330, 331, 335, 337, 340, 341, 343, 344, 350, 351,354, 359, 361, 365, 372, 373, 383, 387, 391, 392, 398, 403,407, 411, 419, 422, 424, 429, 431, 436, 450, 455, 457: n = A,T,C or G
  misc_feature 471, 475, 478, 479, 490, 495, 496, 501, 507, 513, 514, 515,523, 527, 535, 537, 538, 540, 544, 548, 549, 552, 596, 597,598, 602, 611, 613, 627, 628, 634, 664, 684, 685, 694, 708,710, 723, 726, 735, 737, 738, 739, 747, 748, 754, 755: n = A,T,C or G
  misc_feature 759, 773: n = A,T,C or G
aggtactttttttttttttttttttttttttttnaannnaaaaaaaaaaanttttttttttnngnaaaaaanaaaatnnnnnggncctttnnnannnccccccntttnnntttnggnntttnnnaaaaaaanaacnttttnnaaaaattngnnnnaaaaaaaaccnnnttttttnnttttnngggncnggggttttnccccccccccccccctttttttnnnanccccccccccnngggggggaaanttttttccaaaannnggggnccaaaaaaaaaaaaaaanttttcccaaaaacccaaaatttttaaaaanccccgnccntttttnnaaangnccnntnntttttnnggnaaaangncccnttggggnntcccggggancccncccnntttttnagggncccncccntttttttncgnanacccncnccctnggggggccccaaanacccntnggggggggaaaaancccnaannggataaaaaanccttnnggtcngggggnaaaaannnaaaatctnccanggggcttnannanaaantttnnccnctttccttttcccccagggggaaaaaggggaaattttttttaannnaaanagggccccncnggggttttttttannggtttnaaaaaaaaaaaatttttttaaaaaaaaaanattccccctttttttttccnngggggggcnctttaaaaaaaaangngaaccccccccgnccngggggaaantnnnttttaaanntttttnnttancccccccccccccnc

SEQ ID NO: 582 - DNA, 823 bp, Homo sapiens
  misc_feature 2, 11, 26, 55, 89, 94, 96, 100, 101, 107, 114, 115, 119,123, 125, 126, 132, 136, 145, 148, 149, 156, 158, 163, 167,169, 170, 180, 182, 189, 191, 198, 205, 208, 211, 212, 215,218, 221, 233, 234, 238, 251, 274, 282, 286, 287, 308: n = A,T,C or G
  misc_feature 310, 314, 316, 317, 325, 326, 329, 335, 403, 445, 450, 474,478, 488, 490, 494, 504, 551, 560, 561, 567, 568, 580, 581,594, 607, 644, 647, 648, 661, 663, 667, 686, 705, 706, 716,758, 771, 777, 781, 784, 788, 792, 799: n = A,T,C or G
angtacccggnggcggaaaccacccnttcaaacgtctgccctatcaacttttaanggtattccccgtcctaccatggtgaccgcgggtnacagngnaatnnaggttnaatttcnnaganggancnngataanctgntaccacatntanngaaggcntnacgcncgcnanntaaaaatgtnanctaaaanangaaatangtttgtngcnganntanctnttnaaaataaggtcnncccngagtaggggtaanacctccaacatgactggtatccntataaaangganngggggggacacaaaaacactntnacangnntaatgccnnatnctgatnaccgcagaaattggggtattgtttctattaccccagggaatcccaattttgccagtgacccccaaaantttaaggagaagcctggaacaaattcttctgcacaagtcctnaaaangaaccagctttgcttaaccccttnattntaaactgccngncttncaaaactganaataaaattcctgttatgttaagcttgcccttttgtgggggcttttntttgggccnncctttnnccaaatttattnnaaaaccccggccnttgaaaaaaaggnccaaaattttttttcctaaaaaagccttggggctggnggnngcatttcttgcantncccntttcttttggccctgggcnctttaatttaaggcctttnncctttttgantttatttccccttggcccccaaaataaacttcaacccttgcnccccttaaaaatnaaatgntganttntttnaaanccgtggntttttttcccccattttttttttt

SEQ ID NO: 583 - DNA, 461 bp, Homo sapiens
  misc_feature 21, 37, 107, 214, 228, 241, 303, 414, 453: n = A,T,C or G
atggagtcttgctctgttgcncaggctggagtgcagnggcgcgatctcagctcactgcaagctccgcctcccaggttcacgcctcccaggttcacgcctcccgagtngctgggactacaggcgcccgccaccatacctggctaattttttgtattttcagtagggacgggtttccgccacgttggccaggatagtctcaatctcctgaactcgngatccgccctcctncgcctcccaaagngctgggattacaggcgtgagccaccgcaccgggcctcttgtcactatttaacaaagcataanggctcctctctgcctactctaccagatccatgctctttagcctgccaggccaggctgtccctacctcacatcccctgatcagctacattataatctaaggcctatctcctntttaaccctgaacgtacctcggcccgtctagaactaagngggatccc

SEQ ID NO: 584 - DNA, 216 bp, Homo sapiens
  misc_feature 16, 20, 36, 59, 61, 69, 73, 78, 91, 93, 96, 106, 115, 139,149, 160, 169, 195: n = A,T,C or G
atgaagtttgttttgncganaaattaggttacttgngtatcaaagcttatttttaaatngngttagggngtanccaanccctttattctananatnctttagctgnattactaanacatagctagtatctctacttaangctctgggtngtaaacagggnctttccatngttctacctttaggatttcaatagtntaaaaccggttggtttttgat

SEQ ID NO: 585 - DNA, 475 bp, Homo sapiens
  misc_feature 14, 27, 250, 430, 435, 440, 442, 445, 447, 448, 449, 450,451, 470: n = A,T,C or G
tccccgcggtggtngccgcccgggctngtacgcgttcatctgtaatctcagcctcccgagtagctgggactacaggcgcctgccaccacacccggctaattttttgtatttttagtagagatgggttttaccatggtctcgatctcctgacctcctgatctgcccaccctggcctcccaaagtgctgggattacaggcgtgagccactgcgaccggcccactttttctttttacttttaaaaatgtgggntaatagaaatttatgagattatatttatggttcatactacgtttcttttggacagtgccagagtgaatcagataagcttgcattttaaaatcctaagggtaaatgcaatagagatagaacgcaaataattggggaggggggttgactgaaattaaagatgtattaatccaaaagaaggcncaaantaaananaancnnnnnggtacctcggccgctctanaacta

SEQ ID NO: 586 - DNA, 845 bp, Homo sapiens
  misc_feature 513, 667, 668, 681, 709, 720, 731, 741, 754, 762, 774, 783,789, 794, 821: n = A,T,C or G
ccgggcaggtacttcaattgaatccagattttatttgtatttcatttctcaatattttctcctctacaaaaacagagtgaagttgtaagaatactagacccaagtttcaaaatctcatgttaagtgagattttgcatgtcctccgtaaaatttctggagcactttataaaagtttattttcgtggaaatcaaaaaaccaggtcatgatattcttttctaagtccctaaacctgtctaacaatgcaaaggttgtctgtccttcttacatgtagactcatttgtctaagtgggccttaacatgtatgatttccatcaaggctgcttggcaaaggctttctgttagtgtgtaaggggaatatgatgaccaatataacaacctcagtatttcctctacctctcttcaactcctcaacgtgaacccaatgtttttgtggaacacaaagcctctgaatgcctgggaagtcaccagtgtgatcccagccaccacccattaatcttcttaactagcatgtncctcatcattacctccctttccaaagccctttgcatgtgcctgttccctggccagaaaagccctcaactaaatggcccaagaagctaatggagaattcccccccaaaaatggggaaaaattggaatattaaatggagaaaagttttaaaaaggnngccaaagatcaangccccggtgccagtggtggcaccgcctngtaatccccancccctttttanaaggccccangttggggccgggnttaacaanggtcagggagantccgagaanccattncttgngcttacaacggtgaaaacccttgtctnttacttaaaaatacccaaaaaaaa

SEQ ID NO: 587 - DNA, 860 bp, Homo sapiens
  misc_feature 129, 214, 251, 281, 300, 322, 334, 335, 373, 378, 380, 394,411, 412, 416, 426, 427, 454, 457, 479, 498, 504, 516, 518,519, 520, 521, 535, 563, 572, 573, 598, 599, 605, 617, 622,629, 645, 656, 659, 668, 672, 673, 677, 679, 690, 693: n = A,T,C or G
  misc_feature 696, 697, 707, 718, 730, 741, 743, 762, 764, 793, 801, 804,813, 814, 828, 852, 855: n = A,T,C or G
aggtactttttttttttttttttttggccttatatcagttttattggtgggtttgtagctccctgggccgggcctggctgcttaggccagtctcttgctcacgcgctcataggtcacgcctccgatggnggagacctccaccagcttgtcacccacgatctctgaggtctggtgatagttggggaaattcaccaccagcttcccgccctccatntgcacagtggccttagaacgtcttgccccctattggnctgtatgtttgctttccttgccaacagtgnaacttgttttggtcatggnggtggcccccgggagtagttgnttggggaccaanntgaaagtcctgcccatccttgctgcacctttccggtgnaccantnctttggaaagtttngccgggcccttttttcnngaantaccatccgnnttgggaggaatcccccaaaggggaagnctnttcaatggaaaccttccaattncaataaaattttcttttcntcaacntctttccaattntnnnnaaaactttggcccngggtgggaaaaaagcccaatggcctggnttgggggannggctttttccctttttaatggtggnncttggnttttcaattttnttctntgccaanggttctttcctttttntccgggcttcnacncccattggnggcnnccgncnaagaccaaaanaanaannttttcccccncggccggttancccttgcccccnggggcggggcncngctttttaaaaaacttaangntgggaattcccccccccggggggcttgcnaggggaanttnccaatattnntaagcctttaattncggatacccgggccaaccctcttnaanggggg

SEQ ID NO: 588 - DNA, 833 bp, Homo sapiens
  misc_feature 58, 84, 93, 103, 129, 153, 154, 169, 175, 176, 179, 182,192, 194, 195, 200, 204, 209, 220, 226, 234, 236, 241, 248,255, 256, 263, 264, 265, 267, 269, 287, 295, 315, 318, 324,328, 332, 339, 349, 351, 354, 358, 373, 379, 380, 385: n = A,T,C or G
  misc_feature 394, 395, 396, 406, 426, 427, 428, 429, 430, 431, 437, 444,446, 447, 449, 459, 460, 462, 463, 465, 470, 477, 487, 492,507, 510, 529, 530, 535, 537, 540, 545, 550, 554, 567, 573,584, 589, 595, 606, 613, 628, 636, 642, 643, 674, 675: n = A,T,C or G
  misc_feature 689, 699, 737, 739, 742, 744, 756, 757, 759, 783, 800, 801,803, 805, 812, 816, 818: n = A,T,C or G
gctccaccgcggtggcggccgaggtacttatttttttttttttttttttttttttttnaattgttttttttttttttttttttncctgtttgnctgatttttnttatttaaaaaaatggaaaaacaaangtgcatttttcattcaataaatgnnccatccttatttagntttgtnnccnaangggaagtccntnnctttngaanggatntgcaatttatnaaccancagcaatncnttttnacaccgntttcaannaacctgnnncnanttttcccttgaacctggngggggggnaaaatttctgaaaactgggnggnagatcncccntttnaaaagcncctttggggncnttntacnttgggccctgaaatngattcnnccccncttttttannnccatttcccntggaaaaccgttaaaggggnnnnnnctttanaaaaaananncntgtcaaaagnntnntntttgnactcttnaccaaggccnattancccccaaggttttcnccncttgggaaaaaattcttannaaaancntgnggttntgggngganccatttggggganttttanccattcccagncgggncggggnttccctttggnacccccntcccaatgggggccncccgcttnttgggnnaacttttggcgggcccccgggaactttttannaagacccccccccntttacccttnccccggggccggggcccgtttttttaaaaaacttaaantnggnantccccccccggnncntggcgaggaaaaattttttaaaanttaaaagcttttttttnnananccccccncacncntattaaggggggggg

SEQ ID NO: 589 - DNA, 350 bp, Homo sapiens
  misc_feature 284, 304: n = A,T,C or G
actgaaaaccttgggatacacctaaagctgcagtcacaaattcacaatcctgaatcttttctttaagaataagcaaaaaccaatgcatcttcaacgtaaacaatgttaaagacgaacacaggccaggcacggtggctcaggcctgtagtcccagcactttgggaggccaaggcgggtggatcatgaggtcaggagatcgagaccatcctggccaacactgtgtaaccccgtctctactaaaaatacaaaaattagccggatgtagttggtgttgccccttgtantcccagctactagggaagcntgaggcaggaagagttcccttgaaccccaggaagcccgggagggtt

SEQ ID NO: 590 - DNA, 857 bp, Homo sapiens
  misc_feature 111, 114, 116, 117, 119, 122, 127, 130, 133, 136, 138, 148,152, 155, 160, 162, 163, 167, 168, 170, 172, 173, 176, 177,178, 182, 184, 189, 190, 191, 198, 199, 203, 208, 209, 213,215, 216, 227, 228, 232, 237, 238, 240, 241, 247, 254: n = A,T,C or G
  misc_feature 259, 262, 264, 266, 272, 277, 279, 281, 282, 287, 290, 296,300, 308, 317, 320, 322, 327, 331, 335, 341, 344, 345, 359,361, 367, 369, 371, 382, 386, 389, 391, 394, 400, 401, 408,411, 413, 422, 428, 429, 433, 442, 452, 454, 460, 471: n = A,T,C or G
  misc_feature 475, 507, 510, 519, 520, 522, 531, 537, 555, 558, 567, 572,573, 580, 584, 586, 589, 590, 605, 607, 608, 613, 622, 623,624, 625, 632, 634, 638, 652, 660, 678, 682, 683, 684, 687,690, 694, 695, 714, 715, 723, 732, 736, 744, 753, 756: n = A,T,C or G
  misc_feature 763, 765, 766, 776, 786, 796, 802, 807, 808, 809, 810, 817,820, 826, 832, 841: n = A,T,C or G
actttttttttttttttttttttttttttttcttttttttttttttttttttttttttttttttttttttttttttttttttttttttttttttttttttttttaaaaaanggngnntnaanaaaanctnggnaanantcccaagggnaaanggnaaaangnngggnnangnnggnnnaaangnaaaannncgctttnntttnccccnncccnannaaaaaaaaccnngggnaaaanntnntaggtnaaaaaancaggnaancnancatttnggggncncnnacggnaancccccngggngcccattnaaaaaaaanggnanccccngggngggngaaatnaannacaaacttttaaanancccaancncncgggggggggncccnaancnaanttttannccccttnaangngggtaaatncccccnngganaaaaaaaangggcaaaaantnttcccnggaaaaaaaangttncccccaaaaattcaaaaaaaaaaaaaaacccnganaaaaaaaanntnaaaaacccngggggnccaaagggggggaccccnccnaaaaaaaantttgnntccaaancacncnccnnatttttcaaaaaaancnnaaaanaccgtggtnnnngccaagntngaanaaaaaaaaaaaaanggaccacncccccccgggggaaaaangggnnnttnaanaaanntgggggcccttattccacnntttctatnaaaaaaaanaaanatcggggngaaaaaggnaanaaggggngnnggggacgggntataaaaacnaaacaaaaangggggnaaatnnnnttttccnaanaaaacnaggggnaaaaacccnaaaaaaaaaaaaattt

SEQ ID NO: 591 - DNA, 644 bp, Homo sapiens
  misc_feature 9, 10, 11, 13, 28, 37, 40, 45, 54, 55, 56, 60, 61, 62, 64,67, 74, 76, 85, 92, 108, 112, 115, 154, 157, 164, 169, 180,182, 184, 191, 198, 207, 211, 217, 223, 237, 238, 239, 248,275, 279, 323, 330, 346, 357, 376, 378, 383, 394, 413: n = A,T,C or G
  misc_feature 419, 420, 424, 429, 437, 442, 453, 456, 464, 478, 483, 484,494, 496, 513, 519, 533, 534, 540, 548, 549, 550, 552, 556,564, 570, 579, 580, 592, 599, 604, 618, 623, 625, 629, 636: n = A,T,C or G
aggtacgcnnnancttcaggctccgaancggtgtgtngcngatcnaagcgctgnnngaannntnganaaacctnangagtaaacntgttccnatctatgataagaacntggncanatccccatgtgtgacaccggtgaccagtgatcattgagnaangggacanggatngggaagctatntnantgccccngaagaanctgctgcanttcnttcctnctgaantgcttatgaagggnnnttacattcncctgcatacattcccatccctctactntccncatgaggaccacaccttctctccctgagagtttggcttaagcanccagatnaagttttttattttcntttgaaggggnaagggctcttttcctgctntnttcgnaaattaaaaanaacccatttagatgtttanccgggnntaangaaanaaatgccnttgtntgggcgggttnatnccttgtantgaaaggatttctnaattnntattttgggnanaacaaaaacttttttgnggtttnccttgccccgggcnnggaccntttttaannnancttntggggatncccccnggggcttgnnaggaaaattttnatttatnggaancttttttttcgatncccgncnaaanctttaangggggggg

SEQ ID NO: 592 - DNA, 485 bp, Homo sapiens
  misc_feature 44, 46, 48, 197, 199, 346, 370, 378: n = A,T,C or G
aggtactttttttttttttttttttttttttgagacagagtctntntntgttgcccaggctggagggtaatggtgcagtctcggcccactgcaatctccgcctcctgggttcaagcaattctcctgcctcagcctcccgagtagctgggattacaggagccgctaccacgcccagctaatttttgtatttttagtananactgggtttttccatgttggtcaggctggtcttgaactcctgaccacaggtgatctacccgccttggcctcccaaagtgctgggattacaggcgtgagccactgcaccgggccttggatttttggcattctggaattttggcatggngggggttctggctggaggtggaancatccgtnttggccccactggccttggggccaaagccctggtccatccccaggccaagtcctaccaaatcagctgctaagcctgaacaagcacttgaaagcaggggtttggtctt

SEQ ID NO: 593 - DNA, 492 bp, Homo sapiens
  misc_feature 60, 86, 214, 239, 253, 322, 336, 343, 345, 392, 403, 421: n = A,T,C or G
aggtacttttttttttttttttttttttttttttggaggggggagcctgaaggtgacatnttgttggtttggagatgatttattcnctcgtattgtaaaatctaaaatgacactcctgggaagaggaaggaactataaggacccgtgtgacccattgctgtctgcctgaagccctggcgctctgacctgagtgcaccggggttaggtgtctcanccaaaatgcaggactgcacgacgtntaacacattggganagattgctcttgaaacatgggggtggggtattcacctgcattccaaaaagtttggggggattctggganaccccagttggagntccttcngnactttcacaagggccttgtcttccccacactttcaaaatttccaaantcgttcctttnacccaaaaaggtggggtnagggagtcacctggactattcaattttccccaaaaaattcttaaaaaaaaagggagggtttacccccgggg

SEQ ID NO: 594 - DNA, 607 bp, Homo sapiens
  misc_feature 24, 440, 479, 503, 525, 540, 558, 573, 586, 588, 592, 597: n = A,T,C or G
aggtacgcggggaccgcagcccancaactcgcaaacgcaacctgaagcctgggctgcgcagtgtgggagggcttcgcgatcttgggggacccattccgaacttgcagaggaccgtagctctcctggcctggagagtgtgaacaggattgtggactcttccaagattcacaatgatatggtgaatccaaagactggaaccaaaaagatttactcagtgctttagttttaacaacagtaaattgtctaccaacacccatcatggctaaaagtgcggaggtcaaactggcaatatttgggagagcaggcgtgggcaagtcagctcttgtagtgagatttctgaccaaacggttcatctgggaatatgatcccaccctcgaatcaacctaccgacaccaagcaaccatcgattgatgaagttgttttccatgggaagatactanacacttgctggtcagggaaagataccattcagaaggganggggcacatgcgatgggggggaangctttttgtgcctggtcttacnacattactgaccgangaagttttttgaggaaantgcttcccacttaanaaaacattcttanantgangatcnaaaaaagccc

SEQ ID NO: 595 - DNA, 693 bp, Homo sapiens
  misc_feature 94, 97, 100, 101, 102, 114, 116, 118, 120, 123, 134, 139,141, 143, 144, 150, 151, 152, 156, 157, 169, 170, 174, 177,180, 181, 182, 184, 197, 199, 201, 204, 205, 206, 207, 209,210, 211, 220, 228, 229, 230, 232, 234, 235, 246, 247: n = A,T,C or G
  misc_feature 249, 263, 264, 265, 268, 274, 277, 279, 280, 281, 288, 289,291, 293, 297, 303, 314, 315, 323, 329, 332, 335, 336, 338,339, 340, 347, 354, 356, 359, 366, 381, 382, 384, 398, 417,422, 423, 434, 439, 441, 444, 445, 448, 451, 452, 453: n = A,T,C or G
  misc_feature 464, 467, 474, 475, 480, 481, 490, 491, 493, 495, 496, 517,520, 522, 523, 532, 533, 542, 543, 545, 546, 547, 548, 551,556, 562, 566, 578, 579, 581, 583, 587, 596, 599, 600, 601,602, 603, 604, 618, 622, 642, 648, 660, 665, 669, 672: n = A,T,C or G
actttttttttttttttttttttttttttttttttttttttttttttttttttttttttttttttttttttttttttttttttttgcccggggnaancannnttttttttaaancnananttnaaaacttttanttttngnannaaaaannngggnntttttaaaaaanngggnaanccnnnanaaaattttttaantntnaannnntnnnttttttaanttttttcnnnantnnttcccaaaatnngnttttttttttaaannnaantttaanccngnnntttttcnncncnaaantggggnaaaaaagtttnngggggggnaaaaanttnggnngnnntaaattnaaaaagngnttnttttttnaaaaaaaattttaanncnttaaaaaaaaaacngggggaaaaatggggtttngcttnntaaaaaaaaanggccncngtnnccnacnnnggaaccccccnccncctttannggggnnttttttttnntngnnccctttcttttaaaaaaaaanagngnngttttggannccccccaanngnnnnccnccccnaacctngggncctttttaaaanntngngggntccccccgnggnnnnnnaaattttttttttnaagnttttttttttcccctttacntttttnggggggggcccngggcncccnaantttttttttcccttttttggg

SEQ ID NO: 596 - DNA, 427 bp, Homo sapiens
  misc_feature 48, 111, 144, 160, 226, 236, 251, 252, 253, 256, 267, 305,311, 320, 335, 344, 366, 378, 422: n = A,T,C or G
ccgggcaggtaccgggatcgccgagacaaggtggcagcaggtgcttcngaaagcacacggtcaaatgagaggaccgtcattctgggaaagaaaacagaagtgaaagccacnagggagcaagaaagaaacagaccagaaaccatncgaacaaagccagaanagaaaatgttcgattctaaagagaaggctttcgaggtagagaaacctaagatgggaagaattgacnaagttagatnaaggaagccgagacnnnaanagaaagcccanccagatgaagggagaagggctaagggaagaaaggactncacccngaaaggganaaagaaccgttgccnaagaagaanaagagggtgccccgatttagtnttagaaaggtantcccccagggacaagaaagaagccaaggaagggtgttccccccntaaaa

SEQ ID NO: 597 - DNA, 561 bp, Homo sapiens
  misc_feature 64, 68, 71, 72, 80, 85, 91, 94, 95, 97, 99, 101, 103, 105,106, 107, 112, 114, 118, 121, 123, 129, 131, 132, 135, 137,138, 143, 146, 148, 152, 153, 155, 156, 157, 159, 177, 178,180, 181, 184, 186, 188, 189, 190, 196, 198, 199, 204: n = A,T,C or G
  misc_feature 207, 211, 214, 215, 219, 220, 223, 228, 230, 235, 241, 248,249, 257, 261, 262, 266, 273, 277, 278, 279, 280, 290, 304,305, 306, 310, 315, 329, 335, 337, 349, 353, 368, 369, 370,374, 375, 376, 377, 379, 380, 381, 383, 385, 386, 392: n = A,T,C or G
  misc_feature 394, 404, 406, 410, 412, 413, 415, 420, 426, 428, 437, 438,445, 448, 450, 451, 452, 454, 469, 478, 481, 482, 489, 491,497, 498, 503, 504, 507, 517, 525, 530, 536, 537, 540, 546,547, 553: n = A,T,C or G
tttttttttttttttttttttttttttttttttttttttttttttttttttttttttttttttngggnccnnggggaaanttttntttttnccnncngnancnannnttttncnaaanccngnaccccngnnttngnnaaaanccngnaaanntnnntnttttgcaaaaaaaaaatnncnncangncnnncctttncnntttgnaantccnttnngccnnaanttaancnccttncccatnggggcanncctttaangaanntggnggttctncttnnnncccctggggnaaaaaaaagggggnnnttcnggggnagggggggaaaaanacaacncntggggggggggntttnaaaaaggcccccccnnnccannnnannntnanncccctntnggggggaaantnacananntntttcntggggngnccccaaaanncctgtgncgncnnnangattttggaggggtnctttttttntcnngaccccntnaacatnnagacnnggntttgggtganccccccgnccctnttttannttnttctcnncccccngggggggg

SEQ ID NO: 598 - DNA, 649 bp, Homo sapiens
  misc_feature 371, 462, 470, 547, 555, 560, 572, 577, 584, 622, 631: n = A,T,C or G
aggtacaaacccagtttgttttcaaaaaatcacagtagcaatgcaactcatcactctagaaaagcaagcttaggctacctgaaagattttcccttggaagtttagcgtatgtttgactaacaagaattccctacatcagagactctaggtgctatataatccaaaaacttttcagcctgttgctcattctgtcccatgctggcaataataccttgtcagcccattacccttattttgaattgctccatctcctggtgggacttgtatcttgtctgccatatcagaacacaaacccctgaagaggttctgattttgattttttttttttcttcatgcctaccctttttttggaagtttccagccgcaatttnaaatgaaatgacaaggtgtatatttgatcaattttcattcccaccattgcattcaaacctctaacttaaatgggtaaccctaaggcatatnaaaagaancagactgcatggataaaaacgggaaaatagaaaaaaaaaggaaccttaccatttaatttttgggttttaagcaaccntttacttntcacntttttatggaanaattngagaagntgggacctttaccattttcccttttttttaacattttntcggaattncttttatttttttttttt

SEQ ID NO: 599 - DNA, 251 bp, Homo sapiens
  misc_feature 77, 91, 94, 109, 148, 152, 169, 170, 188, 204, 208, 239: n = A,T,C or G
ctcatataggcgaatggacctccacgcggtggcggccgcccgggcaggtactttttttttttttttttttattatanaaaacaagtgaggnccnaatgatcacaaaaanaaggaataattctaagtctcaaaattggcaagaaataangtcngatgctaaagtccaaannttacgataatgcacttgngccaggaccaatgccnatanagaacttgaaaattaagatgagacatttttnaagaacaagtga

SEQ ID NO: 600 - DNA, 395 bp, Homo sapiens
  misc_feature 73, 123, 132, 139, 202, 204, 307, 351, 361: n = A,T,C or G
aggtacttttttttttttttttttttttttcgagatgaagtcgctctgtcacccaggctggatggagtgcagnggtacaatctcagctcgctgcaacctccgcctcccaggttcaagcgactntcctgcctnagccttntgagtagctgggattacagacccatgccaacacgccctccaatttttgcatttttttttgtananacagagtttcaccatgttggcccagctggtctcgaactcatgaccttgtgatccgcctgcctcggcctcccaaaatgccgggattacaggtgtcagccaccgngcctggccttattttcatagtaatatgtaaaatatccataatgngatcaactgngtatttataataaattttaataatatctccgtaa

SEQ ID NO: 601 - DNA, 301 bp, Homo sapiens
  misc_feature 266, 279: n = A,T,C or G
ggcgaattggagctccccgcggtggcggccgaggtactttttttttttttttttttttttttgggacggaatttcatccaggctggagtgcaatggcgcaattttggctcactgcaacgtccgcctcccatgttcaagcgattctcctgcctcagcctctcgggtagctgggattacaggcatgagccaccatgcccggctaaccttgtattttcagtaaagatggggtttctccatgttaagaattgagagagccactgaaaggngagtcaggaagcntcatgatcacagccgtgcctta

SEQ ID NO: 602 - DNA, 361 bp, Homo sapiens
  misc_feature 97, 154, 259, 269, 288, 308: n = A,T,C or G
tctgtctcccaggctgtagtgcagtggcatgatcacgactcactgcaatctctgcctcctggattcaagcaattctcctgcctcagcctcctgagtngctggattacaggcacacaccaccacgcctggctaattttttgtatttttggtaganatggggtttcaacatgttggccaggctggtctcaaactcctgacttcaagtgatctgcctgcctcagcctcccaaaatgctaaggttgcaggcgtgagccaccgntcccagcctnaaaatagtttctaatgatnggatacatccagttctccanatccagcattctggttacttaacaaagagataatagtttcttttattgcttct

SEQ ID NO: 603 - DNA, 186 bp, Homo sapiens
acctgtaatcccagctactggggaagctgaggcaggagactcgctggaacccaggaggcggaggttgcagtgagctgagatctcaccactgcactccagcctgggtgatggagcaagactccatctccaaaagaaaaaaaaaagagaggccccagttcaggctagctctgtctgtcttgtggggca

SEQ ID NO: 604 - DNA, 49 bp, Homo sapiens
ttggagctccacccgcggtggcggccgaggtactttttttctttttttt

SEQ ID NO: 605 - DNA, 101 bp, Homo sapiens
  misc_feature 32, 33, 35, 44, 61, 62, 64, 65, 66, 67, 74, 77, 81, 83, 86,91: n = A,T,C or G
ccgggcaggtactttttttttttttttttttnnantaaaggggnttttttttttttaaaannannnnaaaaaanccntttncnttnaaaanaaaaaaaaaa

SEQ ID NO: 606 - DNA, 343 bp, Homo sapiens
  misc_feature 73, 123, 227, 237, 294, 300, 329, 337: n = A,T,C or G
ccgcggtggcggccgcccgggcaggtactttctcttttttttttttttttttttgagagatagagcctcactntgtcacccaggctggagtgcaatggcatgatcttggctcactgcaacctncgcctcccgggttcaagccattctcctgcctcagcctcccaagtagctgggattacaggcacacgcaaccacgcccagctaattgtttttgtattttagtaganatggggtttnaccatgttgcccaggctggtcttaaattcctgagctcaggcaatccacccgcctcancctccnaaagtcctaggattataggcgtgagccancacacccngcaaga

SEQ ID NO: 607 - DNA, 51 bp, Homo sapiens
attggagctccccgcggtggcggccgaggtacttttttttttttttttttt

SEQ ID NO: 608 - DNA, 45 bp, Homo sapiens
ccgcggtggcggccgaggtactttttttttttttttttttttttt

SEQ ID NO: 609 - DNA, 134 bp, Homo sapiens
  misc_feature 54, 75, 77, 98, 117, 122, 125, 132, 134: n = A,T,C or G
cggccggaggctgacgagagccgggaggcgttagcagaaggaagagaaaaaccnaagactaagccactacagcgncncaccgcggcgcggcagtctgntttataggagagggcgcangcccncgngtacctngn

SEQ ID NO: 610 - DNA, 121 bp, Homo sapiens
  misc_feature 10, 24, 49, 85, 111: n = A,T,C or G
cgcttggcgntaatcatggtcatnagcttgtttcctgtgtggaaattgntatcccgctcacaatttccacacaaacaataccgangccccggggagcataaagtgtaaaancctgggggtg

SEQ ID NO: 611 - DNA, 729 bp, Homo sapiens
  misc_feature 66, 70, 71, 74, 77, 78, 80, 81, 89, 90, 91, 94, 96, 100,103, 108, 110, 113, 120, 121, 122, 128, 132, 140, 142, 148,149, 155, 156, 157, 158, 161, 174, 184, 185, 190, 193, 198,199, 200, 201, 202, 203, 204, 205, 206, 219, 226, 227: n = A,T,C or G
  misc_feature 228, 229, 231, 241, 247, 268, 272, 291, 292, 297, 301, 302,307, 308, 311, 313, 319, 321, 323, 324, 333, 334, 336, 337,338, 339, 341, 344, 346, 348, 349, 358, 365, 367, 372, 378,379, 390, 399, 401, 408, 422, 424, 427, 434, 443, 445: n = A,T,C or G
  misc_feature 449, 450, 460, 466, 470, 487, 490, 499, 513, 520, 534, 536,538, 552, 554, 566, 570, 575, 585, 611, 612, 621, 623, 637,639, 644, 645, 647, 651, 653, 666, 670, 674, 676, 692, 700,702, 708, 713, 715, 716, 718, 727, 728: n = A,T,C or G
aattggagctccccgcggtggcggccgcccgggcaggtactttttttttttttttttttttttttngggnnccnttnntnnaaaaaccnnnggncnaaanggnttttnanggntttaaannnaaaaancccntttttttncntttttnncccccnnnnttnaaaaaaaaaaaantttttaaaannttttnggnaaaannnnnnnnntttttaaaaaaanttttttnnnncnggcccccccncgggantttttttttttttttttaaangggntttttttttaaaaaaaaannttttncccnnttttnnttnangggggntnannccccccccnntnnnngnaancntnntttcccccnaaaattngncccanaaaaannccggggctttngggggtttntnggggggnaaaatttttttttngnaanccaaaanttttttttnanggtnnaaaggcccantttttngggnaaaaaaaaacccccccntanaaaaaaaanaatttttttaaaanaaaaaanggcccctttttaantntnaaaaaaaaaaaaananggggaaaatttntttnttttngggggaaaangggggggtttttccccccaaattttnnaaaaagggngngggaaaaacccccngnttaanntngggncntttttaaaaaaanaggnggancncccccggggcgggganaaattttnanttaaanttttntnnanccccccccnnc

SEQ ID NO: 612 - DNA, 167 bp, Homo sapiens
  misc_feature 54, 56, 59, 60, 62, 69, 71, 72: n = A,T,C or G
catcttggtccttttccaccattttcagcccctccagggctgggaggacccggnangannanactcttngnncctcggctgaagtggctgggcatgacgccgtttctctgacgtcccccatagatcttggtcatggagccaaccccagcgccaccccggaggtacct

SEQ ID NO: 613 - DNA, 335 bp, Homo sapiens
  misc_feature 8, 27, 33, 55, 115, 142, 228, 256, 264, 305: n = A,T,C or G
tagtgagnggttaaattgcgccgcttnggcgtnaatcatgggtccataagcctgnttttccttgttgtgaaaaatttgtttattcccgctcacaaattccaccaccaacaatacngaagcccggggaggcataaaaagtgtnaaaaggccttgggggtgcccttaatggagtggagctaaactcacatttaatttgcgttggcggctcacttgcccggcttttcccangttcggggaaaccttgtccgtggccaancttgccanttaaatggaaatcggcccaacgccgcggggggaagaaggcnggttttgcgtattggggcggctcttcccgc

SEQ ID NO: 614 - DNA, 212 bp, Homo sapiens
  misc_feature 14, 28, 184: n = A,T,C or G
gggcaggtactacncaggccttggcatncctggggttcacctggctgactggggtgtttgaggcgggcagcaatgtcttccacggtctcattgccttctgagatgatgcccacacctttggcaatagctttagctgtgattggatggtctcctgtgaccatgatgaccttaattccagcacttngacatttgcccacggcatcaggaacggc

SEQ ID NO: 615 - DNA, 222 bp, Homo sapiens
  misc_feature 94, 129, 176, 195, 200, 206: n = A,T,C or G
cgtcgacctcgagggggggggccccggtacccagctttttgttcccctttagtggaggggtttaattgcgccgctttgggccgttaatcattgngtcatagcatgttttcctgtggtggaaaatttgtntatcccggccttcacaaattttcccaccaccaaaccattaccgaagncccgggggaaggccattanaaagntggtanaaaggcccttgggggg

SEQ ID NO: 616 - DNA, 416 bp, Homo sapiens
  misc_feature 37, 182, 291, 311, 350, 406: n = A,T,C or G
ccgggcaggtaccattcgcacacagagatatcgcctnctttagcggtcattgccttctgacagcggtggaagtccaggtagttctgccagcagtttctagtctggttctggttggggaagcggctgtcaaaaggggcggtcttgtagttcttgattttggtctccatgtcttccgccatggngctgaatcctaaaggcaccccggattcaacctgcagctcaatgtggaccctcagcaaagacaccacagtcggacaggaagcggaaactactaccagcccggaagctganagaggtggggactaccgggnagtctccccgccgtacctcggcccgctctagaaactagngggatcccccgggcttgcaggaaattcgatatcaaagcttattcggatacccgtcngacctcgagg

SEQ ID NO: 617 - DNA, 326 bp, Homo sapiens
  misc_feature 4, 21, 24, 37, 78, 108, 139, 142, 144, 182, 186, 228, 239,249, 253, 254, 276, 279, 320, 323: n = A,T,C or G
taantgaggggttaaattgcnccncttgggccgtaantcaatggtccatagctgttttcctggtgtggaaaaattgtntattcccgcttaacaaatttcccacaccanccattaccgaagcccggggagccattaaaangtngntaaaaagcccctggggggtggcccttaaattgaaggtngganggcttaaacttcaccattttaaatttgccgtttggcgcctcnacttgccccgntttttttccnattnnggggggaaaacccttgttgcgntgncccaacctttgccattttaaattgaaaattcgggccccaanccnccc

SEQ ID NO: 618 - DNA, 618 bp, Homo sapiens
  misc_feature 39, 43, 45, 46, 219, 298, 452, 454, 469, 498, 500, 520, 618: n = A,T,C or G
ccgggcaggtacctcagtccacatctccttcacgttctncagngnncatgttgcagcgcctatcgaaggccttcacgcggcccaggagtttcttattgttgcggcagttgatgagcacttgggtattgttcttgactgactgtgtgagcacagagagtggaccggtgttaaattcctcctcctctcgcttctgcaagctcctctggggtcatctcactnttgggcttgttgaggaggctcatgatggtcactacgctctccgttcactcccgtttcctcccccgcggtacctcgggcncgctctaagaacttaggtgggatcccccgggcctgcaagggaattccgatattcaagcttatcgatacccgtcgacccttcgaggggggggggccccgggtacccaagccttttgtttcccttttaagtggagggttaaattgcgcgcttggcngntaaatcatgggtcantagcctgtttccctgtgttgaaatttggntnatcccgctcacaatttccancacaaacattacgaagcccggggagcataaaaagtggtaaaaagcctgggggggtgccttaatggaggttgaagcttaaacttcacaattaaaatttn

SEQ ID NO: 619 - DNA, 363 bp, Homo sapiens
ggagctccccgcggtggcggccgcccgggcaggtacgcggggacattttctcggccctgccagcccccaggaggaaggtgggtctgaatctagcaccatgacggaactagagacagccatgggcatgatcatagacgtcttttcccgatattcgggcagcgagggcagcacgcagaccctgaccaagggggagctcaaggtgctgatggagaaggagctaccaggcttcctgcagagtggaaaagacaaggatgccgtggataaattgctcaaggacctggacgccaatggagatgcccaggtggacttcagtgagttcatcgtgttcgtggctgcaatcacgtctgcctgtcacaagtacct

SEQ ID NO: 620 - DNA, 403 bp, Homo sapiens
  misc_feature 8, 20, 22, 23, 31, 32, 33, 47, 54, 57, 70, 71, 72, 79, 82,93, 94, 97, 104, 111, 112, 113, 115, 123, 137, 145, 146,147, 148, 152, 153, 154, 155, 156, 162, 185, 186, 188, 193,194, 195, 196, 197, 198, 199, 200, 209, 210, 213, 219: n = A,T,C or G
  misc_feature 221, 222, 224, 227, 234, 239, 246, 247, 249, 250, 261, 263,264, 266, 275, 286, 287, 289, 290, 293, 305, 310, 311, 313,314, 315, 316, 322, 323, 324, 325, 326, 327, 328, 348, 349,350, 359, 360, 376, 377, 378, 379, 380, 381, 382, 383: n = A,T,C or G
  misc_feature 384, 385, 386, 387, 388, 389, 392: n = A,T,C or G
ccctgggnggggggggcccncnnccaagttnnngttccttggggggnagggtcnccncgccccttggccnnnaaaaaanggnttttccttttnngtnaaaaagngaaaaannngntaaaaaanttcaaaaaaaaaanaaaaaaannnngggnnnnnaaaganaaaaaaaaaacgggggggccccnnanggggnnnnnnnnaaccccccnnttntttttntnntngtntcttccnccctnttttttnngnnaaaaaaaaaananngnccccccctnttttttttttnntnnttncccccccccccncgggnnannnngggggnnnnnnntttttttggggggttttttnnnttttttttnnaaaaaaaaaaaaaaannnnnnnnnnnnnnggnggggggggggg

SEQ ID NO: 621 - DNA, 169 bp, Homo sapiens
aggtacgcgggggtgtccgcacagaggtctgcaaggagagagagtgtcttcattctttccgccatcttgattctttctcactgaccaagactcagccgtgggaaatatgagtgagcttgtaagagcaagatcccaatcctcagaaagaggaaatgaccaagagtcttcc

SEQ ID NO: 622 - DNA, 179 bp, Homo sapiens
aggtactccccagcaaatattctttgttggcttgcttgactagatgagctgctatagtagtcaatcctgttagacttggaccattgtttgtctgaagaactggaatctgtcgctcgccctgagcactgtatttattccccttactcagtcccagggacttctccagtagcgacaactct

SEQ ID NO: 623 - DNA, 39 bp, Homo sapiens
  misc_feature 9, 17, 34: n = A,T,C or G
cgataccgncggacctncgaggggggggccccgngtacc

SEQ ID NO: 624 - DNA, 142 bp, Homo sapiens
  misc_feature 47, 87, 123, 129: n = A,T,C or G
aggggttaattgccgccgcttggcgtaaatcatgggtcattagcctngtttcctgtgtgaaattggttatcccgctcaccaatttcncacacaaccattacgaagcccggggaagccataaangtgtanaaagccctggggg

SEQ ID NO: 625 - DNA, 191 bp, Homo sapiens
  misc_feature 25: n = A,T,C or G
ggggcagctggaggtgcctcagaangtgcattctgcttcctgcaggggcttgaaacaccaaggcactccagggatcctggagtcaaagcagcagccccggttgttgcactccttgggggtgacatgggggtagccgcagtccaccctgtccttggctggcacggcacactggtttgcagacaggcccacgt

SEQ ID NO: 626 - DNA, 170 bp, Homo sapiens
  misc_feature 31, 74, 137: n = A,T,C or G
tacccaagcttttgttcccttttagttgagnggttaaattggcgccgctttgggcggtaatcatgggtcatagnttgtttcctggtgtgaaattgttatcccgctcacaattccacaccaacataacgaagcccggngagcataaaagttgtaaagcctgggggtgccta

SEQ ID NO: 627 - DNA, 200 bp, Homo sapiens
acttgccccaaatgtgcaacataaatacagaagcgatgaacagaagactcataaccaatactggaacagggccaactttgaacccaggtgaatcttctgtgtagaatcgccacatccccccggtgcctgccgaggttgtgcggcctgcactccttgtcccacagctggcatttttcctctgccggacagtggatcccgcc

SEQ ID NO: 628 - DNA, 524 bp, Homo sapiens
  misc_feature 146, 234, 272, 380, 412, 417, 419, 423, 425, 432, 437, 467,471, 478, 481, 482, 484, 499, 523: n = A,T,C or G
tgttccctttagtgaggggttaattgccgcgcttgggccgttaatcatggtcaataagcctgtttcctgtggtgaaaattgttatccgctcacaaattccacaacaacatacgaagcccggggagcataaaaagtgtaaaagcctnggggtgccctaatggagtggagcctaacttcacattaaattgcgtttgcgcttcactgcccgcttttccaagttcggggaaacctgtncgtgccaagctgcattaattgaaatcggcccaacgccncgggggagaaggcggttttgcgtatttggggcgcctcttcccgcttccttcgcttcacttggacttcgctggcgcctcggtccgttccggcttgcaggcgagccggtnattaaagcttcacttcaaaagggcggggaaantaacngntttntncacaagnaatcnaaggggggattaaaccgccagggaaaaaanaaanattgttnaanncnaaaaaaggcccagcnaaaaagggcccatggaaacccgtna

SEQ ID NO: 629 - DNA, 638 bp, Homo sapiens
  misc_feature 40, 41, 443, 445, 449, 454, 456, 460, 461, 462, 466, 467,470, 489, 490, 506, 507, 517, 558, 559, 581, 583, 599, 600,623, 629, 631: n = A,T,C or G
aggtacgtccaaatgacgaagtcactgcagtgcttgcagnncaaacagaattgaaagaatgcatggtggttaaaacttacctcattagcagcatccctctacaaggtgcatttaactataagtatactacctgcctatgtgacgacaatccaaaaaccttctactgggacttttacaccaacagaactgtgcaaattgcagcccgtcgttgatgttattcgggaattaggcatctgccctgatgatgctgctgtaatccccatcaaaaaccaaccggttttatacttattggaaatcctaaaggtaggaaataatgggaagcccctgtctgttttgcccacaccccagggtggattttcctcttaaaagaaaaccttgggctgggaatttctggctgtgggtcttattaaaataaaaccttctttaacatggcttccccggangnaaanaaaanancttnnnatanncanaattaaaaaggtacccttnngggcccggcttcttannaaacctaggnggggatcccccccggggcctggcaagggaaatttccgaatnnttcaaaagcctttattccgatnanccggtcggaaccctcnnaaggggggggggccccgggttanccccancntttttgg

SEQ ID NO: 630 - DNA, 784 bp, Homo sapiens
  misc_feature 285, 357, 391, 438, 515, 522, 531, 535, 556, 563, 609, 625,626, 643, 649, 653, 659, 666, 678, 712, 716, 721, 723, 734,742, 759, 764, 771, 775: n = A,T,C or G
ccgggcaggtaccctttccaaggtgaccttcagggggattaaccttcctagctcaagcaatgagctaaaaggagccttatgcatgatcttcccacatatcaaaataactaaaaggcactgagtttggcatttttctgcctgctctgctaagaccttttttttttttttactttcattataacatattatacatgacattatacaaaaatgattaaaatatattaaaacaacatcaacaatccagggatattttttctattaaaaacttttttaaaaaataattgnatcctattataattcaatttttacatccttttttcaaaggccttttgttttttctaaaagggctttggtttntccttttttattatttttttgtccttttttattnttttttggaggacaagtcttggccttctgttccgccttcaagggctngggagtggcaagttgggccaccgaatccttcaggcttcaacctggcgaaacccttcccttccctttcccagggtttncaagggnggaatttcntttngtttcaattcaagacccctcncccgaanttaggccttgggggaccttaccaagggccattggtggcccaccttnttggcccccagggccnnaaattttttttggtganccctcngggncccgcnttcttangaaaaccttaantggggaatcccccccccgggggccttggcagggnaaantttcngntttttccagangccttttntttggattaccccggtncggancccttcngaanggggggggg

SEQ ID NO: 631 - DNA, 713 bp, Homo sapiens
  misc_feature 397, 435, 517, 554, 580, 591, 594, 647, 650, 652, 690, 694: n = A,T,C or G
aggtactgatgcaacagttgggtagccaatctgcagacagacactggcaacattgcggacaccctccaggaagcgagaatgcagagtttcctctgtgatatcaagcacttcagggttgtagatgctgccattgtcgaacacctgctggatgaccagcccaaaggagaagggggagatgttgagcatgttcagcaagcgtggcttcgctggctcccactttgtctccagtcttgacccgcgtacctgcccgggcggccgctctagaactaagtggatccccccgggcctgcaaggaaattcggatatcaaagcttatcggataccgtccgacctcgagggggggggcccgggttacccaagcctttttgttcccttttagtggaggggttaattgcgncgctttggcgttaatcaatgggtcaataggctgttttnctgtggtggaaattggtttatcccgcttcacaaatttcccaccaccaaacattacgaagccggggaggccattaaaaagtgntaaaaagccctgggggtgcccttaatggaagtggagnctaacttcaccatttaaatttggcgnttggcgccttnaantggcccccggcttttttccaagttcgggggaaaaaccttggtccggtggcccnaancnttggcatttaaattggaaattcgggccccaaaacgccncccngggggaagaagggccgggt

SEQ ID NO: 632 - DNA, 232 bp, Homo sapiens
  misc_feature 18, 36, 104: n = A,T,C or G
atagggcgaattggactncaccgcggtggcggccgncgggcaggtacgcgggggacttagtgctcatgctcgctgcaggggtcggaggtcagggcgagcgtctngcaggccgtaggaggaagatggcggtggagtcgcgcgttacccaggaggaaattaagaaggagccagagaaaccgatcgaccgcgagaagacatgcccactgttgctacgggtcttcaccaccaataa

SEQ ID NO: 633 - DNA, 204 bp, Homo sapiens
  misc_feature 7, 32, 65, 142, 145: n = A,T,C or G
cgacctngaggggggggccccggtaccccagncttttgttcccttttagtggaggggttaaattngcgcgccttgggcggtaatcatgggtcataagctgttttccctgttgtggaaaaattgttatccgctcaccaatttncancacaaacaatacgaagccgggggagccattaaaaagttgttaaaaggcccttggggggt

SEQ ID NO: 634 - DNA, 577 bp, Homo sapiens
  misc_feature 32, 58, 74, 181, 231, 244, 284, 290, 320, 381, 386, 387,399, 400, 401, 405, 407, 409, 411, 420, 421, 423, 424, 426,428, 431, 437, 440, 450, 458, 463, 473, 490, 495, 497, 500,503, 516, 527, 530, 543, 546, 547, 575: n = A,T,C or G
tcatccctctacaaggtgcatttaactataantatactgcctgcctatgtgacagacnatccaaaaaccttctnctgggacttttacaccaacagaactgtgcaaattgcagccgtcgttgatgttattcgggaattaggcatctgccctgatgatgcttgctgtaaatccccatcaaaancaacccggttttttatactatttgaaatccctaaaggttagaaataaatnggaaaagccctgntctgtttgcccaccaccccaggttggatttttccctcctnaaaagnaaaaccttggggcctggggaaattttcctngcctggtagggtccttattaaaaaaaataaaaaaccttttcttttaaaccattggccagantatgnncatagtgaattnnncgantntncntaaatattnntnntntnggnttcccnttngggccccggnttcttaanaaacntattttgggnaatccccccccgggtcntggcnanggnaantttcggatattcnaaagcctttantcnagattacccgggnccnnacccctcataagggggggggggccccgngg

SEQ ID NO: 635 - DNA, 613 bp, Homo sapiens
  misc_feature 85, 204, 349, 370, 389, 420: n = A,T,C or G
atatagggcgaattggactccaccgcggtggcggccgcccgggcaggtacgcgggggcagttcggcggtcccgcgggtctgtctnttgcttcaacagtgtttggacggaacagatccggggactctcttccagcctccgaccgccctccgatttcctctccgcttgcaacctccgggaccatcttctcggccatctcctgcttntgggacctgccagcaccgtttttgtggttagctccttcttgccaaccaaccatgagctcccagattcgtcaggaattattccacccgacgtggaggcagcccgtcaacaagcctggtcaatttgtaccttcgggccgctcttagnaactaagtggatcccccgggnctgcagggaaattccgatntcaaagcttatccgatacccgtccgaccttngagggggggggccccggtacccaagctttttggttccctttagtgagggttaaattgcgccgcttgggcggtaaatcatggtcataagctgtttcctgtgtgaaaaattgttatcccgcttcacaatttcccacacaaaccattaccgagcccgggggaagcattaaaagtgttaaaagccctggggggtggc

SEQ ID NO: 636 - DNA, 447 bp, Homo sapiens
  misc_feature 318: n = A,T,C or G
aggtacttttccccacaccagcggtgccgactaccacgacgcggtaatctctgatcttcctgtggggcttgaaggcgcggaggataagcagggcgggcagaagccgcaaccgcttcagcagcttctgttccttggagccaaagctggcgttacccatcgttgggattcggaggggagatacgtgcacaagttctcccacacttagctggcagcaggagacccctttctcggaggcacgaaccaagcagccttagaagacaaatgcgctgctcggaagagactgccgcggcaaccaactgggacaccccccgcgtaccntgcccggggcggcccgcttctagaaacctagtgggatcccccggggctgcaagggaatttcgatatcaaagctttatcgatacccgtcgacctccgaggggggggcccggttaccccagctttttgttc

SEQ ID NO: 637 - DNA, 150 bp, Homo sapiens
aggtacctgcaggcctcccacacctacctctctctgggcttctatttcgaccgcgatgatgtggctctggaaggcgtgagccacttcttccgcgaactggccgaggagaagcgcgagggctacgagcgtctcctgaagatgcaaaaccag

SEQ ID NO: 638 - DNA, 273 bp, Homo sapiens
  misc_feature 15, 195, 197, 206, 213, 223, 226, 242, 252: n = A,T,C or G
gttaattgcgccgcntggccgtaatcatgggtcataacttgtttccttgtgtgaaattggtatcccgctcaccaatttccacacaaacataccgaagcccgggggagccattaaaagtgtaaaagcctgggggtgcctaatggagtgaagcctaacttccacatttaaatttgcgtttgccgcttcacttgcccncnttttccaantccgggnaaaaaccctngtncgtggcccaagcttgnaatttaaatngaaatccgggcccaaccgccc

SEQ ID NO: 639 - DNA, 613 bp, Homo sapiens
  misc_feature 228, 236, 425, 449, 460, 461, 471, 484, 490, 518, 562, 587: n = A,T,C or G
ggtggcgggaggaaccgttacgggaactgaagttgcggattaagcctgatcaagatgacaacctcccaaaagcaccgagacttcgtggcagagcccatgggggagaagccagtggggagcctggctgggattggtgaagtcctgggcaagaagctggaggaaaggggttttgacaaggcctatgttgtccttggccagtttctggtgctaaagaaagatgaagacctnttccgggnaatggctgaaagacacttgtggccgccaacgccaagcagttcccggggactgcttcggatgccctttcgtagagtggtgccgacgccttcttgtgatgctctctggggaaagctctcaatcccccaagcccctcattccaggagtttgcagcccgagtaggggactccctccccttgtcctcttaccgnaagggaaaaaggatttgctattgntcgttaccctnnggcccgctcntagaaactaagtnggaatnccccccggggcctgcaagggaaatttcnattattcaaagcctttattcggatacccgtccgacccttcgaangggggggggcccgggtacccccaancttttttggtttcccttttaagtgga

SEQ ID NO: 640 - DNA, 781 bp, Homo sapiens
  misc_feature 36, 205, 390, 422, 471, 498, 556, 569, 604, 607, 620, 629,641, 668, 673, 674, 680, 681, 691, 695, 708, 743, 749, 759,761: n = A,T,C or G
aggacgcggggaggaagtgtcggcgccgccactgtncggccacagcctaacgctcttcgctgtcgtttgtggtctcgcgcagggcggccccggttctggtgtttggcgtcggaattaaacaaccaccatgtcgagcaaaaaggcaaagaccaagaccaccaagaagcgccctcagcgtgcaacatccaatgtgtttgccatgttngaccagtcacagattcaggaagttcaaagaggccttcaatatgattgatcaggaacagaagatggcttcatcgacaagggaaagatttgcatggatatgccttgctttctctagggggaaagaatcccactggatgcatacctttggatgccatgatgaatgaaggccccaggggcccatcaatnttcaccatggttcctggaccatgttttgggtngaggaaagttaaatgggccaccaagattcctggaagaatggtcattcangaaaaccgcccttttgctttgcttttngattgaaaagaaaagcctaaccaggggcacccatttcaagggaaggatttacccttanattaagaagcctngcttggaccaacccattgggggggggaatccgggnttntaccaagaattgnagggaaaantgggattggagnctggttacccttgccccggggccgggncccgnntcttannaaccttaagngggnatcccccccgggnctttgcaagggaaattccgattattcaaaggcctntattcngattacccgncngacccttcgaaggggggggg

SEQ ID NO: 641 - DNA, 176 bp, Homo sapiens
aggtactttggcctctctgggatagaagttattcagcaggcacacaacagaggcagttccagatttcaactgctcatcagatggcgggaagatgaagacagatggtgcagccacagttcgtttgatctccaccttggtccctccgccgaaagtgagcagtgagctaccatactgct

SEQ ID NO: 642 - DNA, 109 bp, Homo sapiens
  misc_feature 8, 56: n = A,T,C or G
gtctgggnatgccagtggccctgctggatgcaccataagatgagggagccctgggnagcctggcccagggtttctgctgggtaccctgcccgggccggcccgctctaga

SEQ ID NO: 643 - DNA, 340 bp, Homo sapiens
  misc_feature 40, 72, 144, 152, 259, 263: n = A,T,C or G
gaattcgatatcaaagcttatcgatacccgttcgacctcnaggggggggggccccggtacccaagctttttngttccctttaagtgaggggttaattgcgccgccttggccgtaatcaatgggtcatagcttgtttcctgtgtngaaattgnttatccgctcacaattcccaccacaacataccgagcccggggagcataaaagtgtaaagccctgggggtgcctaatgaagtggagcttaactcacattaatttgcgntgcngctcacttgcccgcttttccagtcggggaaaacctgttcgtgcccagcctggcattaatgaatcgggcccaaccccc

SEQ ID NO: 644 - DNA, 183 bp, Homo sapiens
  misc_feature 1: n = A,T,C or G
nccgggcaggtactttggcctctctgggatagaagttattcagcaggcacacaacagaggcagttccagatttcaactgctcatcagatggcgggaagatgaagacagatggtgcagccacagttcgtttgatttccaccttggtcccttggccgaacgtccgtagagttctatagtattgtt

SEQ ID NO: 645 - DNA, 185 bp, Homo sapiens
  misc_feature 74, 142, 168, 169, 171: n = A,T,C or G
tcggtcagggaccccgggatgcccgggtagaagcccagtaaaatgaagcagttttaggaggctgttcctggttntctgctgggtaccttcggccgctctagaactaagtggatcccccggggctggcaagggaaattcgatnttcaaagccttatcggatacccgttnnanccttcgaggggggg

SEQ ID NO: 646 - DNA, 246 bp, Homo sapiens
  misc_feature 65, 231, 239: n = A,T,C or G
ccgggcaggtaccaggctaagtagttgctgctatcactctgactggccctgcaggagagggtggntctttcccctggagacaaagacagggtgcctggagactgcgtcaacacaatttctccgatggtatctgggagccagagtagcaggaggaagagaagctgcgctggggtttccatggttccctctgggtcctaactgagcagctcttctctcccgcgtacctcggcncgctctanaactagt

SEQ ID NO: 647 - DNA, 275 bp, Homo sapiens
  misc_feature 4, 31, 62, 70, 174, 205, 227, 245: n = A,T,C or G
taantgccgcgctttgggcgttaatcatggncattagctgttttcctgtggtgaaaattggntattccgnttcacaatttccacacaaacattaccgaagccgggggagccataaaaggttgtaaaaagccctggggggtggccctaaatggaaggtggaagccttaaacttcnaccatttaaattggccgtttgcggcctcacntggcccccgcctttttccaagnttcctgggaaaaaccttnttcggtgccccagccttgcattttaaaatg

SEQ ID NO: 648 - DNA, 599 bp, Homo sapiens
  misc_feature 57, 59, 65, 336, 350, 434, 445, 468, 507, 544, 580: n = A,T,C or G
aggtacttgttgttgctttgtttggagggtgtggtggtctccactcccgccttgacngnagctgntatctgccttccaggccactgtcacggctcccgggtagaagtcacttatgagacacaccagtgtggccttgttggcttgaagctcctcagaggagggcgggaacagagtgaccgagggggcagccttgggctgacctaggacggtcagcttggtccctccgccgaacactatggcactgaggctgtaagtcccatgttgaacagtaattaatcagcctcgtcctcagggctggaggccccgaaataagtcaggggaggctgtgggtcccanactttttgagccangaggaagcgggtcaggggatccctgaggggcaagagaattttccaaacatcacagttttggggagccgcccgtgaggaaaatcntgttggtaccntgccccgggccggcccgctctangaactaagtgggatcccccgggccttgcagggaatttcngatatcaagctttatcggattacccgttcgaccctcnaaggggggggccccggttaccccaagcttttggttncccttttaagtggaggggt

SEQ ID NO: 649 - DNA, 243 bp, Homo sapiens
aggtacaacaagcgggaaacgatagaggcttggactcaacaagtcgccactgagaatccagccctcatctctcgcagtgttatcggaaccacatttgagggacgcgctatttacctcctgaaggttggcaaagctggacaaaataagcctgccattttcatggactgtggtttccatgccagagagtggatttctcctgcattctgccagtggtttgtaagagaggctgttcgtacctgcccg

SEQ ID NO: 650 - DNA, 403 bp, Homo sapiens
  misc_feature 313, 344, 355: n = A,T,C or G
gatcccccgggcttgcagggaattcgattatcaagctttatcgataccgtccgaccctcgagggggggccccggtacccagctttttgttcccttttagttgaggggttaaattgccgcgcttgggcgttaatcatgggtcataagctgttttccctgtgtggaaaatttgtttatcccgctcacaaatttcccaccacaacaataacgagcccggggagccattaaaaagttggtaaaaagccctggggggtggcccttaaatgaagtggaggcctaaacttccacaattaaatttgccgtttggccgcctncaacttggcccccggcttttttcccaagtancgggggaaaanccccttggttccgttggcccaaggccttggcaatttaaaattggaaaa

SEQ ID NO: 651 - DNA, 745 bp, Homo sapiens
  misc_feature 64, 303, 319, 409, 416, 419, 454, 475, 480, 497, 542, 627,639, 670, 685, 688, 695, 698, 722, 724, 733: n = A,T,C or G
acgcgggaaatatattatatatggatgtgtgtgtgtgcgtgcgcgtgagtgtgtgagcgcttcngcagcctcggcctaggtcacgttggccctcaaagcgagccgttgaattggaaactgcttctagaaactctggctcagcctgtctcgggctgacccttttctgatcgtctcggcccctctgattgttcccgatggtctctctccctctgtcttttctcctccgcctgtgtccatcttgaccgtttttcacttgtctcccttttctggacctgtccctgccaatggctccagcttgtcgtnctgactcttggggttncgtttggggggacatggaagaattttttattttttttggtggaagttgaagactggaaggggatcggtaggaattttttttacaaaattntgtgaantanttttggaacaaaatttcttgggggttgcccgaagntggttgaagaaggttggttgnaagcnaagggggccttttggcnttccctgggcccaaacccaaccaaattttccaaattggaaaattncccccggaaccccccccccttaaccccccaattggccttggtaaccccttggccccccgggggccggggccccgccttcttaggnaaacctaaggtngggaattcccccccccggggccttggcaagnggaaaatttccgaantantccaaangcntttaattcgaataaccccggtccngnaacccttcnggaggggggggg

SEQ ID NO: 652 - DNA, 745 bp, Homo sapiens
  misc_feature 320, 325, 339, 358, 374, 407, 410, 412, 475, 483, 494, 503,505, 512, 518, 526, 528, 541, 566, 588, 603, 617, 643, 667,684, 686, 701, 706, 714, 721: n = A,T,C or G
ccgggcaggtacgcggggccctctctgtcttctctgcagtgggagcagctctcctgccacggctcctcaccccctgaaaatgttcgcctgctccaagtttgtctccactccctccttggtcaagagcacctcacagctgctgagccgtccgctatctgcagtggtgctgaaacgaccggagatactgacagatgagagcctcagcagcttggcagtctcatgtccccttacctcacttgtctctagcccgcagctttcaaaccagcgccatttcaagggacatcgacacagcagccaagttcattggagctggggcttgncacanttggggtggctggntcttgggctgggaattggnactggtgttttggaancccaatcaattgggtatgcccaggaaccttttnttnancaacagctttttttctaacgccaattttgggcttttgccctttcggaagggccatgggggctntttttgtnttgaaggggangcccttttntnatccttnttttgnccattgtngnaaaggaaacccgnttttcaacccttcccaataaagttnttcccccgtttttgggttgggnccccccgggggggtnccctttttccttanaaccctcccccaaagccaaacccttngggggaaacctggggttgggcttnaagggtttttggccccnanaaaaaaaaccaaaanaaaantacctgtnttttaantggggaaaaaaaaaaaaaaaaaaa

SEQ ID NO: 653 - DNA, 737 bp, Homo sapiens
  misc_feature 44, 45, 46, 68, 352, 442, 536, 581, 610, 681, 696, 718: n = A,T,C or G
aggtacagaactttacagaatagaggcaatactttagcttaagnnngtctgctgaccagagaatgganttctgcgtggactcaaggaacaaaaggaaactaggcagggaaggggaagaaaagtgcccatctgaatcaaacttcagctgccatcagggcacatcttgtggtggtcacagattgtaggctgttttttggaagattcgggttcagcacaggattccatttgtctacttggctacacccctggctgaggtgcccatgaggtccaatgtcactcaaagttcctgggcccagctcaaaactccccgcaagcaaaaagagtccccaaaatttagtatcaaagttcctcncgggaaggtcattccctatcagttggcaaaagcgggtaagaccgccccgaaaagcccaatctccccaccgttgtcccggtatttcggggnagtttcatttagcccgaagcccagccaggcgcctcaccggggaccagtgcctggaaagcccataagtgggaaaagccttttccgccattggggnccttcgggtggggagggaccccccggcgttacccttgccccgggnccggggccgcttcttaagaaacttaagtnggaatcccccccggggccttgcaagggaaattccgaatattcaaaggcctttatttccggattacccggtncgaacccttttgaanggggggggggcccccgggttanccccagccttttttggttt

SEQ ID NO: 654 - DNA, 705 bp, Homo sapiens
  misc_feature 73, 251, 376, 406, 480, 688: n = A,T,C or G
aggtacgcggggatactttctgagagtcctggacctcctgtgcaagaacatgaaacatctgaggttcttcctnctcctggtggcagctcccagatgggtcctgtcccaggtgcagctgcaggagtcgggcccaggactggtgaagccttcacagaccctgtccctgacctgcactgtctctggtggctccatcagcagtggtagtttcttctggaccttggatccggcagcccgccgggaaagggactggnagtggattgggcgaaatccttaccagtggggaagcaccgactacaaccccttcccttcaaagaagtccgagtctccattgtcaagttgggaagaaagtcccaaagaaccaagttctcccttgaangtttgaagtttctcttgacccgcccgtcangaccgccggcccgcttcttagaaactaagttgggatcccccgggcctggcagggaattcgatattcaagcttantcgaatacccgttcgtaccctcggaagggggggggcccggttaccccagcttttttgttcccttttagtggaggggttaaattggcgccgccttgggccgtaatcatgggtcattaagctggttttcctgtggtggaaaatttggtttatcccgctcaacaaatttcccacaacaaacattaccgaagcccggggaagccattaaaangtgttaaaaagcccctg

SEQ ID NO: 655 - DNA, 127 bp, Homo sapiens
aggtactgcatctttaatctcttgctgggcacgccgcccagattggccgaggcctcgctccggaccatcgcagacgccgccactaggagaagcagcagaagcctcatcttaaatgagccagccactt

SEQ ID NO: 656 - DNA, 334 bp, Homo sapiens
  misc_feature 185, 254, 255, 273, 289: n = A,T,C or G
cggtacccagccttttgttccctttaagtgaagggttaattgccgccgcttggcgtaaatcaatggtcataagctgtttcctggtgtgaaaaattgttattcccgcttcacaaattccacacaaaccattaccgaggcccgggggagccaataaaaggtggttaaaagcccttggggggtggccntaaattggaagtggaaggcctaaacttcaccaatttaaaatttggcggttttgccggcttcaacttggnncccgcctttttcccaagntcgggggaaaaaaccnttggtccggtggcccaagccttggcaatttaaaatggaaaattcg

SEQ ID NO: 657 - DNA, 823 bp, Homo sapiens
  misc_feature 353, 376, 464, 481, 530, 553, 559, 593, 673, 697, 724, 732,743, 761, 765, 767, 769, 772, 779, 782, 802, 804, 805: n = A,T,C or G
aggtcggccgaggtacgcgggaactctgtcaacgaaggcttgaaccaacctacggacgactcgtgctttgacccctacacagtttcccattatgccgttggagatgagtgggaacgaatgtctgaatcaggctttaaactgttgtgccagtgcttaggctttggaagtggtcatttcagatgtgattcatctagatggtgccatgacaatggtgtgaactacaagattggagagaagttgggacccgtcagggagaaaatggccagatgatgaagctgcacatgtcttgggaaccgggaaaaggagaaattcaaggtgtgaccctcatggaggcaaacgtgttaccgatgatnggggaaagaccattaccacgtangaagaacagttggcaggaagggaatatctcggtgccatttgctcctgcacatgcttttgggaggccaagccgggggcttggccgcttntgaacaaacttgccgcnagaacctggggggtgaaccccagtcccgaaaggcactactgggccaagncctaccagcccagtattctcagnagattnccatccagaagaaccaaaaccccttaatggtttnatttggcccccaaatttggaggtgccttttcattggcccttttaagaaatgttaccccttgcccccggggccggggcccncttcttaagaaacttaggtggggnatccccccccgggggcctggcaagggnaatttccngaatttccaangcctttattccgaattanccgntncnaanccttccnaangggggggggggcccccgggntnncccccaacttttttttgg

SEQ ID NO: 658 - DNA, 651 bp, Homo sapiens
  misc_feature 514, 524, 565, 599, 608, 615, 620, 636: n = A,T,C or G
aggtactttaggagacccaggcgggcagattgcctgaggtcaggagtttgagaccggcctggctaacatggtgaaaccctgtctctactaaaaatacaaaaattagccgggcatggtggctcacgcctgtagtcccaactgcttgggaggttgaggcaagagaatcgcttgaacccaggaggtgggggttgcagtgagccgagatcgcgccactgcactccagcatgggcgacagagcaagactccatctcaaaataaagaaagaaagaaacaaagaaaagaaaagcttatattgaacttctctaaaaaaagaaaaaaaagaaagcctgatgcacacaaatctaaatttggcaagtcgatcaattaaaggatatttatttgcatcacaaaataattctttactccccccaaaaatcaataaaaagttcaaatagcaacttttcctaatgtgtttaaaatgtaatcaccaaatacatgtgtccccaactttctttccagttataattctattggngtaaagggangttacctggaagtgaggcaataaagaagagttgagcttcanacctgcctggagagagccgtggttctttttttanagttttganggaaatnggttngggggcaccaaaattnttttaaatctttttt

SEQ ID NO: 659 - DNA, 743 bp, Homo sapiens
  misc_feature 354, 453, 478, 479, 536, 591, 621, 623, 624, 634, 718: n = A,T,C or G
acccaggatctggaaggaaagggccaagctgggctgtggcatccactggaccctagagtcttcattgggcaggggcctcagaaatccacaaaagactccccagtggctgttcctctttcccaacgaggcttggacccccttccagccatttgggaactcaagcaggaaggaaggttccttaggacaggttcctggcatggcaggttcccctgggaagtggtcggagggccctcccaccttcttgatgccagcaagaagtcaagggcctttcctgcttccctgaggacaacaatcagggctttcttgcggacttgggccttctggttcacactggcaacgtttcagaaccccaangtaccctcggccggttcttagaacctagttgggatccccccgggcctgcaaggaatttccgatattcaaggctttattcggatacccgtccgaacctcnagggggggggccccggttaccccannctttttggttccctttaagtggaggggtttaatttgccgccgccttggccgtaaatnaattgggtcaattaagcttgttttccctgtggtggaaaaattgtttaattcccgnttcacaaattttcacaacaaaccattaccnanncccggggaanccattaaaagtggtaaaaagcccttgggggttgcccctaaatggaagttgaagcctaaacttcacaattaaatttgccgtttgncgcctcaacttgccccgctttttca

SEQ ID NO: 660 - DNA, 736 bp, Homo sapiens
  misc_feature 106, 171, 175, 176, 186, 189, 190, 191, 197, 202, 205, 206,221, 267, 273, 281, 283, 290, 291, 296, 297, 300, 301, 304,305, 306, 314, 327, 328, 332, 345, 348, 353, 359, 514, 551,560, 601, 606, 611, 634, 636, 652, 655, 662, 667, 681: n = A,T,C or G
ccgcggtggcggccgcccgggcaggtacagaatggcggtcctgctgacttggctgggctagaggatgaggatgtcatcattgaagtgaatggggtgaatgtgctanatgaaccctatgagaaggtggtggatagaatccagagcagtgggaagaatgtcacactcctagtntgcnnaaagaacgcntannnttattnccaanctnngaaaatccctattgnttcctccctggctgatccacttgacacccctccagattctaaagcnatgtantagcgttntnaatcccnnccatnnctnnggnnnggcccaangaaccgcggcccnncagntaccttcttggcncgntctanaactangtggggatccccccgggcctgcaagggaatttcgatatcaagcttaatccgatacccgtcggaccctcgaggggggggggcccgggtaccccaagcttttttgttccctttagtggaggggtttaatttgcgccgcttggcgtaaatccatgggncaataagctgttttccttgtggtgaaaaatttggttnttcccgctncaccaaatttcccaccaaccaaaccattaccgacccccggngggantccanttaaaaggtggtaaaaaaccccntngggggggtggcccctnaantggaagntggangccttaaacttcancattttaaaatttggccgtttgccgcttcacctggcccccgctttttccaagttc

SEQ ID NO: 661 - DNA, 480 bp, Homo sapiens
  misc_feature 443, 451, 452, 453, 458, 459, 460, 461, 462, 463, 464, 465,466, 467, 468, 469, 470, 471, 472: n = A,T,C or G
tccaccgcggtggcggccgcccgggcaggtacgcggggagacatacactggagtgatgcaactacaaaccaaggaacaccaaggaccaccagcaatgactagagctaggagagaggcatggaatagattctcccacagagctgccagaaggaaccagcattgccaacatcttatttcagacttctagcctccagaattgtgagagaataaatttttgttgttttcagccttccaatttgtgataatttgctatggtagccctaggaaaataatacatctggattccagctttccactcacatcatcgttttctccatccttcccatgtctacatattgttgttccagattaaagatatcttgatgtcacaggtgctgggaattgtttttgtaactctttctcttggtggctctgtggtgattgactcccaaggacaaaaggangcttaccnnnaaaannnnnnnnnnnnnnngtacctcg

SEQ ID NO: 662 - DNA, 493 bp, Homo sapiens
  misc_feature 386, 420, 422, 447: n = A,T,C or G
aggtactctccaagctgctcaaaaagctcacaattttgtttgattaaattctgaggctcttccacaagaggtttaaattcatcgaacactttggcatagcattcatgaggatctgcagcggcgcagcacttctctagagtggtttcatatgtcttggcaagtctcagcagcagcacgacagagtaatcaggatgccttcttgcatattcatacaaaaacatgcccaggaagacatcctttgcctcagcatagtttttgcaaacatccttactttcaacaaaatcagcagcctaatggaaggcaagtcagcagggcatctcatcattttccacttcggcaatgcccctggcgtacctgccccgggcggcccgctctagaactaagtngggatcccccccgggctgccagggaaatttcgantntcaaagccttattccgattcccgtncgaccctcgagggggggggggcccccgggtacccccaacttttttt

SEQ ID NO: 663 - DNA, 493 bp, Homo sapiens; identical to SEQ ID NO: 662
  misc_feature 386, 420, 422, 447: n = A,T,C or G

SEQ ID NO: 664 - DNA, 467 bp, Homo sapiens
  misc_feature 203, 238, 345, 367, 386, 401, 412, 424, 444, 445, 450, 453: n = A,T,C or G
ccgggcaggtacctgggagtggccttctgtgcctgccactgtgcttcccacattgcttagtcacacacataactgggaggtgctgtgttcccagtttttgtgagtgcattgagcccctagtggttctaccccttagcaataactgtccctggaacaggtgtcatcactgtagaaatgcaggttacagcccttgcagaacacanagattgggcccatgaattacacctgagctgccctncttttgttaattgatgagtttgatcaagatcaggaaggtggtgatgcaaaaccggatggccttagacatagtcacagctgctcaaggtggcacctgtgcccttgtanggacagaagtgttgtacctttngccgctctaaaaactagtngatcccccggggctngcagggaattngataattcaaanctttattcgaatacccgttnnacccntcngaggggggggggcc

SEQ ID NO: 665 - DNA, 193 bp, Homo sapiens
  misc_feature 22: n = A,T,C or G
cgaacgcagccatagcgcgganaagatggcaacagttacccccgcgtacctgcccgggcggccgtggctgcccagacgtatttggcgtcgcagtagccgacaatggcggcctcccggcagcagccatcgcacatcaggttatccacgtagctctgccaaccggccatcttcgagcccccccgcgtacctcggc

SEQ ID NO: 666 - DNA, 283 bp, Homo sapiens
  misc_feature 23, 99, 102, 131, 209, 210, 248: n = A,T,C or G
attcatcatggatgctatgagtnagccagggggcaggcttgccatgggttttgtgacacccccatccaaagctcaccatgttgcatcccgcccattgtntgngggaccccaagtttctagccatgtccagntcttcacaaaagctggatgcacatgccaaggcaagccatccacagctgctgctggaagggtggtgcagatctaacagnnggagacattggccacctcagcataggtgtgagcccagnccacaatgttgttggagcatgccaacctgtggctg

SEQ ID NO: 667 - DNA, 161 bp, Homo sapiens
  misc_feature 54, 85, 93: n = A,T,C or G
ccgggcaggtacgcgggcgggctgaataaagccgtgtctcatctacctgctgtntcccaagtgttcttccagctccctgcccctnatcaaccnactctcctcagacctcagctggggcttgaacctgataattggtgtagtcatcaggatgagctgtacct

SEQ ID NO: 668 - DNA, 497 bp, Homo sapiens
  misc_feature 49, 405, 458, 487: n = A,T,C or G
gcggccgaggtactctccaagctgctcaaaaagctaacaattttgtttngattaaattctgaggctcttccacaagaggtttaaattcatcgaacactttggcatagcattcatgaggatctgcagcggcacagcacttctctagagtggtttcatatgtcttggcaagtctcagcagcagcacgacagagtaatcaggatgccttcttgcatattcatacaaaaacatgcccaggaagacatcctttgcctcagcatagtttttgcaaacatccttactttcaacaaaaatcaagcagctaatgaaggcaagtcaagcaaggccattctcggcatttccacttcggccaatgccccgcgtacctgccccgggccggcccgctctagaactaagtgggatccccncggggcttgcagggaaattcgatattcaaggcttattcgatacccgttcgacnctctagggggggggccccggttaccccanccttttgggt

SEQ ID NO: 669 - DNA, 683 bp, Homo sapiens
  misc_feature 14, 269, 310, 470, 514, 599, 623, 631, 634, 648: n = A,T,C or G
tggagctccaccgnggtggcggccgaggtctctccaagctgctcaaaaagctcacaattttgtttgattaaattctgaggctcttccacaagaggtttaaattcatcgaacactttggcatagcattcatgaggatctgcagcggcacagcacttctctagagtggtttcatatgtcttggcaagtctcagcagcagcacgacagagtaatcaggatgccttcttgcatattcatacaaaaacatgcccaggaagacatcctttgcctnagcatagtttttgcaaacatccttactttcaacaaaatcangcagctaatgaaggcaagtcagccaggcatctcatcattttccacttcggcaatgcaagtggggatttttccaacaagaggtttttcacagcattcctttcagtttacttggagatcgaaatcttggatttttcacagattattaccttgggcaagggtnccgcctataaagtaagttggtgggaaaattggttcaacaccganattggacatttggctaaccactttcttcccttcaggacccttttatttaaagtttgggccaggaaaccattattttccatttggnaatttccccccccggcggtaaccnttggcccncgngggccggggcccgncttcttaaggaaacctaagggtggggaattccccc

SEQ ID NO: 670 - DNA, 498 bp, Homo sapiens
  misc_feature 385, 486, 490: n = A,T,C or G
aggtacaaattgaccaggctgttgacggctgcctccacgtcggtggaataattctgacgaatctgggagctcatggttggttggcaagaaggagctaaccacaaaaacggtgccggcaggtcccagaagcaggagatggccgagaagatggtcccggaggttgcaagcggagaggaaatcggagggcggtcggaggctggaagagagtccccggatctgttccgtccaaacacttgttgaagcaaggagacaggaccccgcgggaccgccgaaacttgcccccgcgttaccctgcccggggccggcacgctcttaagaaacctagtgggatccccccgggcctgcaagggaattcgatattcaagctttattccgatacccgtcngaccttctgagggggggggccccgggttaccccaagcctttttgttccctttttagtggaaggggtttaaatttggcgccgcctttggcggtaaatcaatngggncattaagc

SEQ ID NO: 671 - DNA, 469 bp, Homo sapiens
  misc_feature 359, 388, 390, 439, 442, 455, 457: n = A,T,C or G
aggtacgcgggggcagttcggcggtcccgcgggtctgtctcttgcttcaacagtgtttggacggaacagatccggggactctcttccagcctccgaccgccctccgatttcctctccgcttgcaacctccgggaccatcttctcggccatctcctgcttctgggacctgccagcaccgtattttgtggttagctccttcttgccaaccaaccatgagctcccagattcgtcaggaattattccaccgacgtggaggcagctcgtcaaacagcctggtcaatttgtaccttgcccggggcggccgctcttagaacctagtgggattcccccggggccttgcagggaaattcgatattcanagcttaatccgattaccgtcgtaccctangnagggggggggggccccggttaccccaagctttttggtttccccttttanttngagggggttaaantntggcggccgcct

SEQ ID NO: 672 - DNA, 681 bp, Homo sapiens
  misc_feature 357, 423, 515, 569, 578, 581, 630, 661, 665, 670: n = A,T,C or G
agggcgaattggactccaccgcggtggcggccgcccgggcaggtacgcgggtgcccgactcatcacagaaaccaattgccagctgtgggtggtggaggagcagagtgttagccaaatcgatggtgactttgaagactacaagcgggaggtgttggaggccctgggtgaagtcatggtcagccggccccgagagtgaagctttccttcccagaagtctcccgagagacatatttgtgtggcctagaagtcctctgtggtctcccctcctctggaagactgcctctggcctgcagcttgacctggcaaccattcaggcacatgaaaggtggagtgtgggccttggatgtggacccgggnatcccactcttgattgcatcccatttctcttgaaaaggactttgttttgtttctgctttcttcttnatataaactggagcctgggcccttatcccttttgggcatccccccttaaacaaaacaagagggtggaccacccttaattggtgagggttccnatcccagcccaagtttaatgtgggccctattgttcttcaaggactcttcaatcnacttcaagnaangccctgccctctggattttaaccccttacaagcttttcaagggccccangcttggccccccccaagatctttttggggtngggngcctngttcctttttc

SEQ ID NO: 673 - DNA, 595 bp, Homo sapiens
  misc_feature 22, 317, 541, 553, 561, 572: n = A,T,C or G
ttggagctccacccgcggtggnggccgcccgggcaggtactgtgaggtttgatttgtgtgacagaatctggcttccagaagtcaatctgggtcgtgctggtcaactcgcggattatgttaatgtgattttcatcttcaacgttaacacggaacaccttctcgccttcaaagtgctcaccaccatgatgagcagatgccagggccacagtcaccagaaccaagagtgccaacattgtgtctgaccaggtctagtggggtaaggtctcatctcccgcgtacctcggccgctctaagaacctagttggatcccccggggnctgcagggaatttccgatatcaagcctttatcgattacccggtcggaccttcggaggggggggggccccggtacccaagcctttttgtttccctttaagtggaagggtttaaattggcgccgcttgggccgttaatcattgggtccattaggctggtttcctggtggtggaaaatttgttaattccgcttcaccaaatttttccaccaaccaaacaattaccgnaggccccggggnaagcccanttaaaaagtgntaaaaagccccttgggggggtgg

SEQ ID NO: 674 - DNA, 233 bp, Homo sapiens
ccgggcaggtaccacgatgtatagagcaacactggggtaaggtcactgtgggatggttgcctgctgagacctgtgcaaacgtaacacatgccaccatgccaaggatgtggccggaacaagcagccctaccaaggctgggcccccatggactttgtgcctgctgggagtttataggtctgtggggacataggatggccatatcttgccagccaactagactggacattgtacct

SEQ ID NO: 675 - DNA, 841 bp, Homo sapiens
  misc_feature 3, 23, 27, 37, 39, 41, 44, 45, 46, 50, 52, 62, 63, 80, 86,103, 112, 114, 117, 126, 127, 133, 147, 233, 257, 295, 323,325, 421, 432, 438, 445, 529, 578, 602, 617, 624, 642, 652,682, 684, 705, 715, 760, 775, 783, 789, 790, 793, 796: n = A,T,C or G
  misc_feature 817, 822: n = A,T,C or G
ccnggcaggtacacctaaccagnaacngaaatcattntntnagnnnccanancacagaatgnncttggtgagattggccngcggcnttcgaggaactgattgntgcggcagntnatnagcacttgnntattgntcttgactgactgngtgagcacagagagtggaccggtgttaaattcctcctcctctcgcttctgcagcttcctctggggccatctcactcttgggcttgntgaggaggctcatggatggtcacntacgctctccgtttcactcccgttttcctccgccgttngcttgctgccttgaagggagaagccccncngtacctcgggcccgcttcttagaactagtggaatccccccggggcctgcagggaaattccgatatcaagccttattcgatacccgtcgaccttcgnagggggggggncccggntacccangcttttgttcccctttaggtgaggggtttaatttgccgcgccttggcgtaatcatgggtcattaggcctgttttcctggtgtgnaaattgttaatcccgctcacaaattcccacaaccaaaccattaacggangcccgggggaagccataaaaagtngttaaaaagcccctnggggggntggccctaaaatgaagtngaagccttanaccttcaacaattttaaatttggccgtttngncgccttcaactttggcccggntttttccaantttccggggaaaaaccctggttcgtggccccagccttggcatttnaattggaaattcggncccaaacncccccnnggnggnaaaaaggccgggttttgccanaattnggggccgccttttttcccc

SEQ ID NO: 676 - DNA, 425 bp, Homo sapiens
  misc_feature 45, 69, 387: n = A,T,C or G
acgcggggacattttctcggccctgccagcccccaggaggaaggngggtctgaatctaacaccatgacngaactagagacagccatgggcatgatcatagacgtcttttcccgatattcgggcagcgagggcagcacgcagaccctgaccaagggggagctcaaggtgctgatggagaaggagctaccaggcttcctgcagagtggaaaagacaaggatgccgtggataaattgctcaaggacctggacgccaatggagatgcccaggtgggacttcagtgagttcatcgtgttcgtggctgcaatcacgtctgccttgtcacaagtaccttgcccgggccggccgctctagaactagttgggatcccccgggctgcagggaatttncgatatcaagccttatcgatacccgtcgaccctcgagg

SEQ ID NO: 677 - DNA, 292 bp, Homo sapiens
  misc_feature 63, 117, 122, 165, 204, 226, 227, 251, 257, 272, 280, 285,286: n = A,T,C or G
ctttagtgagggttaaattgcgcgcttggcgtaaatcatggtcatagcttgttttcctgttgngaaattgttatcccgcttcacaaatttccacacaaacaatacggaagcccgggngccantaaaagtgttaaaaagccctggggggtgccttaaatggaagtngagcctaaccttcacatttaatttgcggtttgccgcctncaactgggcccgcttttcccanntccggggaaaacccttgttccgtngcccanccttgccattttaantgaattcnggccnnaccccc

SEQ ID NO: 678 - DNA, 351 bp, Homo sapiens
  misc_feature 72: n = A,T,C or G
aggtacgcgggagtgccccaggagctatgacaagcaaaggaacatacttgcctggagatagcctttgcgatntttaaatgtccgtggatacagaaatctctgcaggcaagttgctccagagcatattgcaggacaagcctgtaacgaatagttaaattcacggcatctggattcctaatccttttccgaaatggcaggtgtgagtgcctgtataaaatattctatgtttaccttcaacttcttgttctggctatgtggtatcttggatcctagcattaagcaatatgggtacctgcccgggccggcccgctctagaaactagtgggatccccccgggcctgcagggaattc

SEQ ID NO: 679 - DNA, 177 bp, Homo sapiens
  misc_feature 2, 9, 96, 132, 159: n = A,T,C or G
cnaccctcnaggggggggcccgggtaccccagctttttttgttccctttaagtgaaggggtttaaatttgccgccgctttggccgtaatcatgggncaattaggcctggttttccctggtggtggaaaattngtttattcccgctcaccaaatttcccncacaaacataccgaagcc

SEQ ID NO: 680 - DNA, 276 bp, Homo sapiens
  misc_feature 28, 251, 268: n = A,T,C or G
gctccaccgcggaggcggccgaggtacncgggggctgaataaagccgtgtctcatctacctgctgtctcccaagtgttcttccagctccctgcccctcatcaacccactctcctcagacctcagctggggcttgaacctgataattggtgtagtcatcaggatgagatttagaagtggtggtgcccctcttgtgacagcatttggcagtgtgcagttgggccatcaataaatccaaggtccaagggaacanatgaaaaaaaaaaaaanaaaaaagt

SEQ ID NO: 681 - DNA, 49 bp, Homo sapiens
  misc_feature 7, 30: n = A,T,C or G
gaattcnatatcaagcttttctataccgtntaccttcgagggggggggc

SEQ ID NO: 682 - DNA, 525 bp, Homo sapiens
  misc_feature 29, 70, 390, 414, 433, 467, 497: n = A,T,C or G
caggtacgcgggatctatgagaagaagtntggccaagtccccatgtgtgacgccggtgagcagtgtgcantgaggaaaggggcaaggatcgggaagctgtgtgactgtccccgaggaacctcctgcaattccttcctcctgaagtgcttatgaaggggcgtccattctcctccatacatccccatccctctactttccccagaggaccacaccttcctccctggagtttggcttaagcaacagataaagtttttattttcctctgaagggaaagggctctttttcctgctgtttcaaaaaataaaagaacacattagatgtttactgtgtgaaagaataatgccttgtatgggtgttgataccgtgtgtgaagtattcttattttatttntctgacaaaactcttgtgtacctngggccgctctagaaactantgggatcccccccgggccttgcaaggaaatttcnaatatcaaagccttatccgataccccgggncggacccttcggaaggggggggggcccc

SEQ ID NO: 683 - DNA, 701 bp, Homo sapiens
  misc_feature 364, 505, 537, 574, 601, 647, 648, 671, 691: n = A,T,C or G
acctgcatcagcattagtaatcaacctgttaatccaaggtctttagaaaaacttgaaattattcctgcaagccaattttgtccacgtgttgagatcattgctacaatgaaaaagaagggtgagaagagatgtctgaatccagaatcgaaggccatcaagaatttactgaaagcagttagcaaggaaaggtctaaaagatctccttaaaaccagaggggagcaaaatcgatgcaagtgcttccaaggatgggaccacacagaggctgcctctcccatcacttcccttacatggaagtatattgtcaagcccataattgtttcttaagtttgcagttaccactaaaaggtgacccaatgattggtnaccaaatcagctgctacttactcctgtagggaagggttaaatgttcattccatcctaaggcctattcaaggtaataactcttaccctgggcacttataatggttaaagccttctactgagggtgctattgttcctttaagngggatggttctgacccttgcttcaaatatttnccctcaccttttcccaatctttcccaaggggtacccntgccccggggccgggcccgcttcttangaaacctaagtgggattcccccccggggccttgcaaaggaatttcnnattatccaagcctttattcggantaccccgtccgacccttcgngggggggggg

SEQ ID NO: 684 - DNA, 595 bp, Homo sapiens
  misc_feature 19, 23, 26, 36, 95, 220, 250, 354, 358, 372, 383, 425, 458,459, 464, 485, 491, 504, 526, 572, 576: n = A,T,C or G
tccacccgcggtggcggcncgangtncgcggggccngctggtagtaattccgcttcctgtccgactgtggtgtctttgctgagggtcacattgangctgcaggtctgaatccggggtgcctttaggattcagcaccatggcggaagacatggagaccaaaatcaagaactacaagactgccccttttgacagctcgcttccccaaccagaaccagactangaaactgctggcagaactacctggacttcncaccgctgtcaggaaggcaattgacccgctaaagggaggccgaatatctcttgtgtgccgaatgggtacccttgcccggggccggcccgcttcctaagaaaccnaagntgggatgccccccngggcttggcangggaaatttcggatattcaaaggctttatcggataacccgtnccgacccttctgagggggggggggcccccggtnncccancttttttggttccccttttantggaanggggtttaaattngccgccgctttgggccgtaaantcaattgggttccattagccttgtttttccctggtggtggaaaaanttgntttaattcccgctttcacc

SEQ ID NO: 685 - DNA, 499 bp, Homo sapiens
  misc_feature 212, 334, 381, 404, 448, 457, 458, 459, 460: n = A,T,C or G
ccgggcaggttcgcgggggacattttctcggccctgccagcccccaggaggaaggtgggtctgaatctagcaccatgacggaactagagacagccatgggcatgatcatagacgtcttttcccgatattcgggcagcgagggcagcacgcagaccctgaccaagggggagctcaaggtgctgatggagaaggagctaccaggcttcctgcangagtggaaaagacaagggatgcccgtggataaattgctcaagggacctggacgcccaatgggagatgcccaggtgggaccttcagtggagttcatcgtggttccgttggcttgcaatcaccntctggccctgtcacaagttaccttcggcccgcttctaagaaacttantgggatcccccggggcttgcaanggaaatttcggatattcaaagcctttattccgaataccccgttncgaaccttnnnnaggggggggggccccccgggttacccccaagcctttttt

SEQ ID NO: 686 - DNA, 139 bp, Homo sapiens
cgaggtacgcgggagaggcgactgtccccacctgaatgcttaaatgcctcgttactgggaggtgttctcagaagagccaaatcgaaaaatggaggccggtccttgcgggagaagttggacaagattgggttgaatcttc

SEQ ID NO: 687 - DNA, 242 bp, Homo sapiens
  misc_feature 181, 204, 230: n = A,T,C or G
gtcattagcctgtttccctgtgtggaaattgttatcccgctcacaatttccacacaaacattaccgaagcccggggagcattaaaagtggtaaaagccctggggggtgccctaatgaagtggagctaactcacattaaattggcgtttggcgctcactgcccgcttttccaagtccggggnaaacccttgttcgtgcccaagcntgcattaatgaaatcggccaaccgcnccgggggaagaa

SEQ ID NO: 688 - DNA, 305 bp, Homo sapiens
  misc_feature 64, 124, 142, 202, 222, 263, 280, 287, 288: n = A,T,C or G
ccactaattcaaggactcttaccgtgggagcaactgctggttctatcacaatgaaaccgctggnttgtgtgctcttggtgcgctcctctgcagtggcacagttgcataaaggatcctaccctgngatcaccactggcatctntggaagaaaacctatggcaagacaaatacaagggaaaaagaatgaagaagcagtacctgnggcccgctcttagaactagnggggatccccccgggcctgcaagggaattccgatatcaagncttatcgaatacccgtngaccttnnggagggggggggccccg

SEQ ID NO: 689 - DNA, 461 bp, Homo sapiens
cgaggtactctccaagctgctcaaaaagctcacaattttgtttgattaaattctgaggctcttccacaagaggtttaaattcatcgaacactttggcatagcattcatgaggatctgcagcggcacagcacttctctagagtggtttcatatgtcttggcaagtctcggcagtagcacgacagagtaatcaggatgccttcttgcatattcatacaaaaacatgcccagggaagacatcctttgcctcagcatagtttttgcaaacatccttactttcaacaaaatcaacagcttaatggaaggcaaggtcaagcaggccatctcatccattttccactttcggcaatccccgccgtacctgccccgggccggcccgctctaggaactagtgggatccccccgggctgcagggaattccgatatcaaagccttatcgatacccgtcggacctcggaggggg

SEQ ID NO: 690 - DNA, 349 bp, Homo sapiens
  misc_feature 57, 101, 139, 190, 259, 265, 270, 327: n = A,T,C or G
agtggaggggttaattgcgccgccttgggccgtaaatccatggggccataagcctgntttccctgtgtggaaaattgggtatcccgctcacaaatttcccncaccaaccattaccgaagcccgggaagccattaaaagntgtgaaaagccctggggggtggccctaaatggagtggaagccttaaacctnaccatttaattttggccgtttggcggcctcaccttgcccccggctttttcccaagttcgggggaaaaanccctgntccgntggccccagcctggcatttaaatggaaattcgggccccaacccccccccgggggaanaaggcccggttttgccctattt

SEQ ID NO: 691 - DNA, 816 bp, Homo sapiens
  misc_feature 40, 354, 650, 708, 729, 757, 797, 800: n = A,T,C or G
attggactccaccgcggtggcggccgcccgggcaggttcncgggacattttctcggccctgccagcccccaggaggaaggcgggtctgaatctagcaccatgacggaactagagacagccatgggcatgatcatagacgtcttttcccgatattcgggcagcgagggcagcacgcagaccctgaccaagggggagctcaaggtgctgatggagaaggagctaccaggcttcctgcagagtggaaaagacaaggatgccgtggataaattgctcaaggacctggacgccaatgggagatgcccaggtggacttcagtgagtttcatcgtgttcgtggcctgcaattcaccgtctngcctgtcacaaggtaccttcggccgctctaagaactagtgggatcccccggggctgcagggaattccgatatcaagcttatccgatacccgtcgacctcgagggggggggccccggtaccccaagcttttgttccctttaagtgaggggttaaatttgccgcgcttggcgtaatcatgggtcaataagctgttttcctgtgtgaaaattgtttatcccgcttcacaaattccacaccaaccattaccgagcccgggagcataaaagtgtaaaagcctggggtgccctaaatgaagnggagcctaacctcacatttaattgccgtttgcgctcacttgccccgcttttccaagtncggggaaaaaccctggtccgngcccagcttgcatttaaatggaaattcnggcccaaccccccccgggggaagaaggcccgtttttgccnttnttttggggccgccttt

SEQ ID NO: 692 - DNA, 839 bp, Homo sapiens
  misc_feature 185, 273, 287, 295, 375, 380, 384, 388, 416, 455, 458, 459,461, 475, 493, 502, 534, 541, 615, 617, 621, 640, 648, 654,658, 660, 665, 670, 674, 689, 701, 712, 714, 715, 722, 732,734, 739, 746, 748, 749, 767, 774, 779, 782, 783, 787: n = A,T,C or G
  misc_feature 791, 796, 798, 805, 809, 811, 818, 828, 832: n = A,T,C or G
ccgggcaggtacttgcaatggggccaccatgttttctcccattagccagccccattcatcatggatgctatgagtcagccagggggcaggcttgccatgggttttgtgacacccccatccaaagctcaccatgttgcatcccgcccattgtctgtgggaccccaagtttctagccatgtccagtncttcacaaaagctggatgcacatgccaaggcaagccatccacagctgctgctggaagggtggtgcaagatctaacagttggaggacanttgggccacctcangcataggngtggagcccaagtccaccaatggtttgtttggaagcattgccaaaccctgtgggcttgagccaaaaataactccccaagnaattntggncaanacaattcccggccccttggacctttggnatttaatttgatggccccaacttgcacactggcccaaanganntnctcactaagagcgnggccaccaacccaacttntataaaaangctcattccctcgatggaactaacacccaaantttatcnagggttttcaaagccccccagcttggaagggtcctggagggaaaaagttggggttttgaatggaatgggggccnangggnaagccttgggaaaggaaancaacttgnggggangacnangccanggttnggangaagaacaacgggcnttttatttcaancccccccgccntnncccttanggggccggtntnttaanaaacctnannggggatcccccccggggnccttggnaaggnaannttanatantccangncttaaanggantncccgggnataaaccttntaanggggggg

SEQ ID NO: 693 - DNA, 255 bp, Homo sapiens
caccgcggtggcggccgaggtacgcgggctgggcaaggcagacttctctggaatgtcccagacagacccgtctctgtccaaggtcgtgcacaagtcttttgtggaggtcaatgaggaaggcacggaggctgcagccgccacagctgccatcatgatgatgcggtgtgccagattcgtcccccgcttctgcgccgaccaccccttccttttcttcatccagcacagcaagaaccaacgggattctcttctgcggca

SEQ ID NO: 694 - DNA, 334 bp, Homo sapiens
  misc_feature 110, 114, 138, 139, 195, 275, 291, 307, 311, 312: n = A,T,C or G
ctgcagggaattccgattattcaagccttatccgatacccgtcgaccctacgagggggggggccccggtaccccagcttttgttccccttttagttgaggggtttaaatntgcnccgccttggccgtaatcaatgggnncatagctggttttcctgtgttgaaaaatttgtttatcccgctcaccaattccacancaaacatacgaagcccggggtagccataaaagttgttaaagccctgggggtgccttaaatgaagttgaagcctaaactcnacatttaaatttggcngttttggcgcttcaanttgnncccgctttttcccagttccggg

SEQ ID NO: 695 - DNA, 816 bp, Homo sapiens
  misc_feature 1, 3, 4, 18, 24, 33, 34, 35, 42, 49, 65, 66, 74, 79, 94,100, 103, 106, 127, 144, 157, 159, 241, 250, 282, 486, 507,578, 586, 608, 614, 627, 645, 646, 654, 656, 661, 704, 723,730, 755, 771, 781, 787, 794, 799, 803, 805: n = A,T,C or G
ncnngccaggtacgcggnggaaangggagtgannnaagagcntagtgancatcatgagccttctnnacaagccnaacantgatatgaccccagnggagcngcncangcgagaggagggggaatttancaccggtccactctttntgctcacacagtnantcaagaacaatacccaagtgcttatcaactgccgcaacaataagaaactcctgggccgctgaaggccttctataggcactgnaacatgggngctggagaacgtctaaggagatgtggactgangtacctttgccggccgggcaggtaccagaatataggttcccaaatagatccctggtttgtctttagagacactgaaggggacaacaatagccaattcgggatttcaaacaccccacaaactataccttaggctctgtgagggcaaaagacacagtttatttcaacaacgatcttgttcaacagaacctggtcaccaagtggatngatggatggggccagacccanattgggacaagaactacttcaagtggggtgggctacattgtgctttgccttgcccccgggaacaccattgnacttcacntttttgcaattgcttacattanaactanaagttttggcttncattcaattgaaaaatannataagttntnggcanttgaaaaaccttaacaaaaaaccctttttacccccggcgtttncctttggggccggttttanaaactanttggatttccccccgggctttgcanggaaatttcgattatncaagcctttntttgantacccgnccaancctncnaaggggggggg

SEQ ID NO: 696 - DNA, 476 bp, Homo sapiens
  misc_feature 125, 129, 183, 265, 452: n = A,T,C or G
tatagggcgaattggagctcccgcggtgcggcgccgggcaggtcataatcgttttgtggagtcgcacagttcaggttatggaggcccgtaattaccaaagtgtaaaaaagggcaaaggaaacacncctncattgtagaataaggcattcaaatgtgctgttaccgtttaaaggcagctaatgncaaaacaggcaagtcaagaaaagtggtctggttttggaggtgattttgcatctagaagcattctcttctcgtgcctcaaagnctgaccactgtagagcatgtcttcttcctcaaggccaatgatacttcagatcccagatggtttcatttttcaattgcggtccaaagagagggttgagttgggccagaattgcaatcagccaaaagagatagcagcaacctgaccaggtcaccaccatggtaatgtaactccccggtaggacccttanggatgaaccaaggcccaagaagcc

SEQ ID NO: 697 - DNA, 215 bp, Homo sapiens
  misc_feature 5, 15, 16, 39, 41, 60, 189, 190: n = A,T,C or G
ctttnggcgattggnnctccccgcggtggcggccgaggnanaatagacagcgcagcaaanagaaggcgcgggctgggtgggaagaggattcggactcgtcacactgcagagcagcagagcgagaaaggatgagaagaggcagagaaggcgacggcagaaagaaaaaggaaaactgcggccgaggacttnnttttttttttttttttttttttttt

SEQ ID NO: 698 - DNA, 202 bp, Homo sapiens
gcaacactggggtaaggtcactgtgggatggttgcctgctgagacctgtgcaaacgtaacacatgccaccatgccaaggatgtggcggaacaagcagccctaccaaggctgggcccccatggactttgtgcctgctgggagtttataggtctgtggggacataggatggccatatctgccagccaactagactggacattgt

SEQ ID NO: 699 - DNA, 579 bp, Homo sapiens
  misc_feature 62, 72, 74, 181, 209, 266, 308, 329, 397, 412, 413, 426,436, 470, 481, 532, 539, 561: n = A,T,C or G
ccgggcaggtacgcgggacctggtcagacacaatgttggcactctagggggatggtgactgnggccctggcntntgctcatcatggtggtgagcactttgaaggcgagaaggtgttccgttgttaacgttgaagatgaaaatcacattaacataatccgcgagttggccagcacgacccanattgacttctggaagccagattctgtcncacaaatcaaacctcacagtacctcggccgctctaggaactagtggatcccccgggnctgcaggaaattcgatatcaaagctttatcggatacccgtcngaccttcgaggggggggcccnggtaccccagctttttgttcccctttaagtggagggttaaattggcgcggccttgggcgttaatccantggttcaataagctnnttttcctggggtngaaaatttgnttattccccgcttcaacaaatttcccaacaccanacaataaccgnagtcccggggggaggccattacaagttggttaaaaagccccttgggcggtngcccttnaatggaaggtggaagccttaanctttcaccatttaaattt

SEQ ID NO: 700 - DNA, 856 bp, Homo sapiens
  misc_feature 83, 84, 111, 323, 505, 579, 655, 662, 691, 714, 739, 748,752, 758, 797, 810, 826: n = A,T,C or G
tatagggcgaattggactccaccgcggtggcggccgaggtacccaggatctggaaggaaagggccaagctgggctgtggcatnnactggaccctagagtctcattgggcanggcctcagaatccacaaagactccccagtgctgttcctcttccaacgaggctggaccccttccagccatctgggaactcaagcaggaaggaaggttccttaggacaggttcctggcatggcaggttcccctggaagtggtcggagggccctcccacctcttgatgccagcagaagtcaggccttccctgctccctgaggacacatcagggcnttcttgcgggacttggtcttctggttcacacttggcacgttccaagacccaggtaccttgcccgggcggcccgcttctagaaactaagtggggatcccccccgggcctgccagggaatttcgatatcaaaagcttatctgaataccgtccgaccttcgagggggggggccccgggtacccanctttttgttcccttttagtggagggttaaattggcgccgcctttggccgtaaatcattgggtcaataagcctgnttttccttgtgttgaaaaattggtttattccgcttcaacaaattcccacacaaacaattaacgaagccccggggangccattnaaaagatggtaaaaggccctgggggggtngcccctaaatggaggtggaagcnttaaccttaccatttaaatttgcgnttttgcggncttnacttgnccccgttttttccaaggcccggggaaaaacccttgttcnttgccccagcctngcatttaattgaaatngggcccaactccccccgggggaaaaaaggc

SEQ ID NO: 701 - DNA, 642 bp, Homo sapiens
  misc_feature 72, 76, 77, 99, 101, 423, 445, 468, 489, 557, 566, 633: n = A,T,C or G
attggactccaccgcggtggcggccgaggtacagttttctcagaagactcaagatttcgcccacatcccttngagnncccgctagatctgccgcccggntncatttgtcccactcttcaggacagagttagctgccctctttctttacttcatagtctttgtaagggctcggccaagcgtgggcccgtgggatggagaattccttttggggaggctggttctgcagctgaaaatgtgtggaatagggggcatagagcgtgtcccctgtctcttcaaaaccttgaggtgatttcctcttgaggggtaggctctgttctccacaccataagctctttcttcaccgaagttgaggtttacaggaaagccatccctccaacagggataaatcccatggggggtttcgttgctttgtgagcaagccanaaaactccgggggacctaacantaaaaccaaccaagggaacaccncagccaattgggccagccaanggcgggagcttgaagggatggtggtcattcccaccctgccggtcaaaaggttcaagggaaacattgangcaggggtngatcccagggcccaccccagaatgggcaatgggaagaagggaagcatccgttgaagggtaaaaatgntgggggccc

SEQ ID NO: 702 - DNA, 805 bp, Homo sapiens
  misc_feature 328, 333, 404, 516, 517, 545, 555, 575, 585, 592, 618, 633,643, 676, 687, 690, 716, 735, 746, 747: n = A,T,C or G
ccgggcaggtacgcggggagtccccacctctctcagcttccggctggtagtagttccgcttcctgtccgactgtggtgtctttgctgagggtcacattgagctgcaggttgaatccggggtgcctttaggattcagcaccatggcggaagacatggagaccaaaatcaagaactacaagaccgccccttttgacagccgcttccccaaccagaaccagactagaaactgctggcaagaactacctggacttccaccgcttgtcagaaggcaatgacccgctaaaggaggccgatatctctgtgttgcggaatggtaccctcggccggntctanaactagtggatcccccggggcctgcaggaaattcgatatcaagccttattcgatacccgttcgaccttcgnaggggggggggccccggtaccccagcctttttgttcccttttaatgaggggttaaaatttgccgccgccttggggcgtaaattcatgggtcaattagcctgtttttccttgnngtggaaaaatttgtttattcccggcttnaacaaatttnccaccacaaaccattaccgnagcccggggnaggccantaaaaaggtggttaaaaaggcccttnggggggtggcccctnaaatggaagntggaaggcctaaaccttcaacaatttaaaattngccggtttggncgncttcacttggccccgctttttccaanttcgggggaaaacccttgntccgttggccnngcttgcaatttaaattgaaaatccggcccaaccccccccgggggaggaagggcccggt

SEQ ID NO: 703 - DNA, 398 bp, Homo sapiens
  misc_feature 218, 323, 338, 372, 383, 389: n = A,T,C or G
aggtacggagcaatcgaggaggcataaccacacttggggtggctatagggctggaaaacgctgaagatgactgctttcactgaggttaaggattgtaatattgccagctttgtaaagtcattaaagcagaagtttcttcagtgatcttctctctaagaaacaccatcacctccatgtgccttacagaggcccccccgcgtacctgcccgggcggccgntctagaactagttggatcccccgggctgcaggtaattcggatatcaagcttatccgaatacccgtcgacctctgagggggggggccccggttcccaagctttttngtttcccttttagtngagggggttaaatttgccgcgctttggcgttaantcattggggtncaatangcttggttt

SEQ ID NO: 704 - DNA, 531 bp, Homo sapiens
  misc_feature 348, 379, 385, 402, 415, 427, 431, 462, 484, 487, 489, 512: n = A,T,C or G
acaaggtgctaaaacaggttcaccccgatactggcatctcatccaaggccatgggcatcatgaattccttcgttaacgacatcttcgaacgcatcgcaggcgaggcttcccgtctggcccactacaacaagcgctcgaccattacctccagggagatccagaccgccgtgcgtctgctgcttcccggagagctggccaagcacgcagtgtccgaaggtacctcggccgcttctagaactagtgggatcccccgggctgcagggaattcgatatcaagcttaatcgatacccgtcgaccttcgagggggggggccccggtacccaagcttttggttccccttttaagtngaaggggttaaattgcgccgctttgggcggnaaattnattgggtcaataagctngtttttccctggngggtggaaaatntggnttattcccggcttcaaccaaatttttcccancaaccaaaacaattaccggaangcncnggggaggccaataaaaaaggttngttaaaaggcccttggggg

SEQ ID NO: 705 - DNA, 616 bp, Homo sapiens
  misc_feature 310, 324, 351, 489, 567, 576, 596: n = A,T,C or G
ttggagctccaccgcggtggccggccgaggtacgcgggcatgctggagatggacaactcaatgaaaatttaaagggaaaaccctcaggcctgaggtgtgtgccactcagagacttcacctaactagagacagtcaaactgcaaaccatggtgagaaattgacgacttcacactatggacagcttttcccaagatgtcaaaacaagactcctcatcatgataaggctcttacccccttttaatttgtccttgcttatgcctgcctctttccgcttggcagggatgatgctgtcattagtatttcaccaagnaagtagcctttcangaggggtaaccttaacaggagtgtcangatctatccttgtcaatcccaaaccgtttttacattaaaaataagaggatccttttaagtgcaccccagtggacctgacattaagcaggcatctttaaacacagcccgtgtgtttcaaaatggtaccctgcccggggncgggccgctctaagaactagtgggatcccccggggcctggcagggaattccgatattcaaaagcttatcgatacccgntcgaccctngaggggggggggcccgggtncccagctttttggttcccct

SEQ ID NO: 706 - DNA, 175 bp, Homo sapiens
  misc_feature 33: n = A,T,C or G
gctccaccgcggtggcggccgcccgggcaggtnctccttgaataccacttagagtcagaaagataaggcagcaaatcagaatggcagtttgattcatggtgctgagactggaggttcctctgctgtaggctcagaatatgtctaagcaattgaggaatgtctcccccgcgtacct

SEQ ID NO: 707 - DNA, 271 bp, Homo sapiens
  misc_feature 21, 55, 58, 105, 116, 118, 122, 162, 167, 204, 214, 237,243, 265: n = A,T,C or G
taagttgaaggggttaaattngcgccgccttgggcgtaaatcatgggtcattagnctngtttccctgtgtggaaattgtttatcccgctcaaccaatttccaccncaaaccattancngaanccccggggaagccaataaaaagttgttaaaaggcccttgnggggnttgcccctaaaattggaaggtggagccttaaaccttnaacaatttanaattttggcggttttggcggccntccacnttggcccccgcttttttccaangtccgg

SEQ ID NO: 708 - DNA, 221 bp, Homo sapiens
aggtaccacgatgtatagagcaacactggggtaaggtcactgtgggatggttgcctgctgagacctgtgcaaacgtaacacatgccaccatgccaaggatgtggcggaacaagcagccctaccaaggctgggcccccatggactttgtgcctgctgggagtttataggtctgtggggacataggatggccatatctgccagccaactagactggacattgt

SEQ ID NO: 709 - DNA, 480 bp, Homo sapiens
  misc_feature 27, 28, 34, 43, 45, 59, 76, 158, 168, 214, 222, 307, 308,324, 347, 358, 387, 446, 463, 470: n = A,T,C or G
ttagctccaccgcggtggcggtcgccnngggcangtacctacngngtggcgctggggtntggctccatgaccatanatctattgggggacgtcagagaaacggcgtcatgcccagccacttcagccgaggctccaagagtgtggcccgccgggtcctncaagccctgnaggggctgaaaatggtggaaaaggaccaagatggcggccgctctanaactaggnggatccccccgggctgccaggaattcgatatcaaagcttatcgatacccgttcgacctctgagggggggggccccggtaccccanncttttttgttcccttntaaattgagaggttaaatttgcngccgctttggncgttaaatcaatgggtccataagccttgntttcccttggtgttggaaaaatttgttttaattcccgcttcaccaaaattttcccaacnaccaaaccaatttaccngaaggcnccgggggaag

SEQ ID NO: 710 - DNA, 706 bp, Homo sapiens
  misc_feature 308, 338, 367, 475, 488, 494, 506, 508, 600, 604, 609, 617,622, 631, 638, 642, 652, 659, 665, 676, 679, 693, 706: n = A,T,C or G
ccgggcaggtacgcggggagagaggttgagaacaacccagaaaccttcacctctcatgctgaagctcacacccttgccctccaagatgaaggtttctgcagcgcttctgtgcctgctgctcatggtagccactttcagccctcagggacttgctcagccagattcaagtttccattccaatcacctgctgctttaacgcgatcaataggaaaattcctatccagaggctggagagctacacaagaatcaccaacatccaatgtcccaaggaagctgtgatcttcaagacccaacggggcaagggaggnctgtgctgaccccaaggagagatgggtcanggattccatgaagcatctggaccaaaatntttcaaaatctgaagcccatgagcctttattacatgggacctgagagtcaaaagcttggaagaaaaggcttattttatttttccccaacctccccccaaggggccagnggggaccatttanttttanttattaaccatncnccaaaagagaattatttttttaaaattaattttaaaaagcattaaattttttttttttaaaaaaggggtttttaaattattatttttaaagntggntggangggttttnaactnttatttttngcaaacnattnctaaaggggnaatggtnaaaaanggcaaaaaatnccngggggggagggggntttttgggttttn

SEQ ID NO: 711 - DNA, 496 bp, Homo sapiens
  misc_feature 201, 207, 217, 232, 296, 298, 301, 316, 318, 332, 349, 350,352, 376, 391, 408, 423, 440, 441, 442, 445, 446, 459, 463,470, 475, 483: n = A,T,C or G
cgaggtacgcggggacattttctcggccctgccagcccccaggaggaaggtgggtctgaatctagcaccacgacggaactagagacagccatgggcatgatcatagacgtcttttcccgatattcgggcagcgagggcagcacgcagaccctgaccaagggggagctcaaggtgcttatggagaaagagctaccaggcttnctgcanagtggaaaanacaagggatgcccgngggataaaattgctcaagggaccttggacgccaattgggagaatgccccaagtgggacttttantngangttcattcgtggttngngggcttgcaaattnacgttttggccttgttnncnaaaggtacccttgcccccgggccngggccggtttttaanaaactaaggtgggaatnccccccggggctttngcagggaaattttcgannnttnnaaagcctttattngaantaccccngcccnaacctttnaaggggggggggg

SEQ ID NO: 712 - DNA, 439 bp, Homo sapiens
  misc_feature 290, 291, 295, 297, 302, 308, 319, 340, 395, 408, 416, 423,424: n = A,T,C or G
aggtacgcgggattgagagctctgctatgccactgttgaatttttcccaagattcctgtccctagccctcacttcaaactctgcttccttggacagatttggcaatagctttgtaagtgatgtggacataattgcctacaataatgaaaacctacaggaatttttttatttttcattttccccttaggcatatttagtatttttcccccaggcagatcattctgagtgtgcgagtgtgtgtgcacatgttacaaaggcaactaccatgttaataaaatattcaattttgnnctangnaaaantatgangaaaagggtanctgcccggggcggcccggttntaagaaactagtggatcccccccgggcttgcaagggaaattccgaatatttaagnttaatccgaatanccgggcgnacccttnnagggggggggggccc

SEQ ID NO: 713 - DNA, 432 bp, Homo sapiens
  misc_feature 41, 68, 80, 93, 107, 118, 131, 153, 196, 198, 204, 207, 212,228, 232, 246, 257, 265, 278, 288, 303, 324, 325, 327, 337,340, 342, 343, 344, 347, 348, 360, 361, 372, 374, 377, 386,401, 402: n = A,T,C or G
aaattggagcctccacccgcggtggcaggcccgaggtaccnttttttttttttttttttttttgattngcaacaggcaanaagtttatcgacncactaatgattaancaaggaaaacncattttacaattnaaagacaaaaccgaaccaatangacaaaagaatctgataaaggattacaggagtagctgcagctntntggccncangtttnttagcagtagcttcancacnccttttgttaaggntgtcatacatntatacatnctgggggaccagngactcaagcntgcctgcattttacntctttgaaatttttacattcnnanaaccagccgnttngnnnacnnaaaagtttgggnnggtacatttantnccnaacacacanggccctggggttccnncctgcgtttttattggcgaaattttttaaa

SEQ ID NO: 714 - DNA, 618 bp, Homo sapiens
  misc_feature 425, 450, 511, 533, 554, 559, 568, 575, 587, 605, 615: n = A,T,C or G
gaaagggtatgttaaatagttcagccagtagctcaccacagggattaagggcatctgccagaatgacatcaaactttgactcttgtagtttcatcataagtttcttattcaaaactgcatctttacagagcttgttactgtagtcataatattcccaacacaattcttgtaattgtgaaaaatatgaccaaaatgtattttttgaaacaccatatatccatctatcgagaattttcagaagagaatcttccaaatcatttttagttaaagatgtaggataaacttctaatttaatagcagatgatttactggcattgacaagagtagaagccgaagatgtcaacacagtcacctcatggacccctctggacaagctcttcccagggattggtcttcatatttatcccaatggctggtattctggngggcccccacttagcaccttttcancaagctttcccagagcttaaagttaaccaacctggagctcccgcggtacctgccccgggcnggccgcttctaagaacctaggnggatcccccccgggcctgcanggaanttccgattntcaaagncttattcgattnccgtccgaccctccgaangggggggggnccc

SEQ ID NO: 715 - DNA, 231 bp, Homo sapiens
  misc_feature 33, 40, 42, 68, 231: n = A,T,C or G
ggctcccatcctccggaatctgcaaaatggctncttcttnanaaataatggggagagggatggctttnaggccagagatcaaggccctcgagtattaacttgagcatttgggcacaaaatagacacttttggattttcccgtcttttccaacaccaaggatgagattatcaaaagatgtgttaaattaatttgtacctcggccgctctagaactagctggatcccccggan

SEQ ID NO: 716 - DNA, 215 bp, Homo sapiens
  misc_feature 22, 25, 34, 35, 37, 80, 140, 146, 160, 168, 170, 180, 189,198, 199: n = A,T,C or G
cgataaccgtcgaccctcgagnggngggggcccnngntaccccagctttttgtttcccttttaagtggaggggttaaatntggcgcgctttgggccgtaaatcatggggcataagcctggttttcctgttgtggaaaatntgtgtnttcacgctcacaantttccacncnacataccgancccgggaanccattaaanntgtaaaagcctggggg

SEQ ID NO: 717 - DNA, 686 bp, Homo sapiens
  misc_feature 5, 158, 168, 260, 299, 320, 439, 475, 561, 573, 602, 627,636, 640, 641, 673, 679: n = A,T,C or G
gcggnggcggccgaggtactctccaagctgctcaaaaagctcacaattttgtttgattaaattctgaggctcttccacaagaggtttaaattcatcgaacactttggcatagcattcatgaggatctgcagcggcacagcacttctctagagtggttncatatgtctnggcaagtctcagcagcagcacgacagagtaatcaggatgccttcttgcatattcatacaaaaacatgcccaggaagacatcctttgcctcancatagtttttgcaaacatccttactttcaacaaaatcancagctaatgaaggcaagtcancaggcatctcatcattttccacttcggcaatgcagtgggatttttccaacagaggtttttcacagcattccttcagttttactggagatcgaatcttgattttcacagatatacttggnaaggtccgcctataagtaagttggtggaaattgttnaacacctaattgacatttgctacactttctcctttagaccttttatttaagttgggcgggaacatattccttttgttttcccccanattacctggccncggggccggggcgcttctaaaaaactagntggggatcccccccgggcctgcagnggaatttcnaatnntcaaaagcgtttattcgattcccggccgaccntcccanggggggg

SEQ ID NO: 718 - DNA, 473 bp, Homo sapiens
  misc_feature 324, 358, 369, 396, 416, 419: n = A,T,C or G
aggtacgcgggggacattttctcggccctgccagcccccaggaggaaggtgggtctgaatctagcaccatgacggaactagagacagccatgggcatgatcatagacgtcttttcccgatattcgggcagcgagggcagcacgcagaccctgaccaagggggagctcaaggtgctgatggagaaggagctaccaggcttcctgcagagtggaaaagacaaggatgccgtgggataaattgctcaaggacctggaccgccaatggagatgcccaggttggacttcagtgaagttcattcgtgttcgtggcttgcaaatcaccgtntgccctgtcacaaagtaccctggcccgggcgggnccgcttcttanaacctagttgggaatcccccccggggnctgcaagggaaatttcgaantantcaaagcctttattcgaatacccgttcgaacccttttgaaggggggggggcccc

SEQ ID NO: 719 - DNA, 697 bp, Homo sapiens
  misc_feature 487, 499, 598, 628, 631, 649, 671, 675, 685: n = A,T,C or G
ggcgaattggagctccccgcggtggcggccgaggtacacgggggtggctgcatgccagccagacacccagtcttgcaagactgtcattgaaaatctccgttttgctgttctccgggtctctgcgtccagtctttgtgtttggacggacctgccgggccatctttctgcaagaagataaaggaagaccaggagtgcctgccgaactcctatggaggaagtctaggagaggaaggggacagggaggaagatggtgtctgcaaaccaggaagcagccttgccagacacaggattggccacaaccttgaccccagacttccagcctccagaactgtgagaaataaatgtccatattgactaggggcacagggcatgggggaactggttccagacctgcctcctggggaagtttgggaggggggcatttcaacctgttaatttctcaaattatgtagtcattccaaaaagaaatagaaaccaccttcatttnactttgtgattngccaaaattatttggatcaaatttcttcataagaaaaggttataaccatttttcccccttttttgggtaccctgccccggggcggggccgctttttagnaaactaagtgggattcccccccggggctgnganggaatttccgattattcnaagccttaatctgattacccgntccnacccctcgangggggggggccc

SEQ ID NO: 720 - DNA, 687 bp, Homo sapiens
  misc_feature 442, 460, 472, 508, 515, 534, 535, 549, 592, 601, 609, 611,620, 637, 646, 653, 660, 663, 672: n = A,T,C or G
ccgcggtggcggccgcccgggcaggtacttttttttttttttttttttttggtttaaaatttctggcaggtagagcaggtgccctcccccagacacttgcaaaaatgtagagagaggtggagggctggggtgcctgcgagcaggtcccagttgcaagaattaaagccttgcaacaggttgggggaagcagggcagcgccaggtgcacgcagtgagcggaggccggagaaaccctcaagcctgagcgggtcagaattataggggaaaaaaagccacaaaattgttcacccccaagcaaccaccgaaataatgagatcggatgcagtggagatggcgttgggggtgggagagaaaaatggatttatctttaaaatttttgcttaaaatctaaaatacacccccgctttttaaccctcaacttccagcggtgcgcggcgccgcanaacaggtaagaggcgttngcttgcagcccnagagggtgggagaaaatgttgaaattcaagaatttnaaaaacnaaaaaccaaaaacccaaannaacccccaaacccnttaaacaccttttttttttccacttttggccaccttctttttncgaaaattntcaggttntncgccaaaanttccgggaaaaaggggngaaaaaacnggagggnggggttnttnaaaaagggngccaaaaaaaagggg

SEQ ID NO: 721 - DNA, 530 bp, Homo sapiens
  misc_feature 308, 326, 353, 455, 459, 465, 522: n = A,T,C or G
ccgggcaggtaccaacagccccttccctcccaagttaggtgagcccttgggccagtgtatgggcagaaaagcagatttgtgtccttcaaaagggaaatgtaaaaaaggtgaaagctctagttgaagggcagtgagaggggctggagtgggagagaaggtctctcctggccggtggtctgggtgcagcaagggcactctgagaaggcagaatggaaacgcagggctggaggggccatgggcacaggtttgggggctccttccagcctctactatgttgcccccttccccaaagcccttacaggggccanaagccacattcccccgtngaccctgagtcttggcctcattttggngaaagtccttctgggggtgtattgggatgcctgtgtgttgttgagtggaagatgggttggggggggccaacgggcttatcttgggcttcttagcacacttcnatgngggaanaacccaagcctctttggggaaacaaacaagggattgggggggtgccttgggggaatnggggggtt

SEQ ID NO: 722 - DNA, 294 bp, Homo sapiens
  misc_feature 19, 28, 30, 35, 38, 41, 44, 66, 72, 78, 81, 86, 92, 93, 108,110, 139, 141, 142, 149, 163, 164, 168, 177, 178, 179, 190,196, 207, 209, 219, 222, 233, 245, 247, 249, 251, 253, 255,259, 264, 271, 286: n = A,T,C or G
ggaattcaaaattaacatncttgtccgngngcttnttntanacnccaaaaaaagtttcaaccttgngttccncattgntcngctgngctttnnccaaaagaacctttntnagccggttgccaccatcaggaggaaagancnnaaggggntttatttttttgcnnaggnggtccattnnnttttaaaaagnccccgngggaccttggncngctttaaaantangggatcccccnggctggaggaantntnanantnaaancttanttggatncccgtcgaacctttngggggggg

SEQ ID NO: 723 - DNA, 494 bp, Homo sapiens
  misc_feature 276, 329, 337, 356, 360, 363, 369, 399, 426, 444, 469: n = A,T,C or G
tcagtccttccttttataaggacaataattggagtagtttaatcttattcatgtgcagataaaagaggtttatgaagtttagggtgaagtaggcaagggaatctgtttactccctcttccctctactgaataattttccctctactgaataattttccctctaagaattgctgtgggtaataccaggagtggggacattgcccacatgcataagagcgtatctctccattcgatcagtttgtcaccatctttgctctgttttgaaagtcaggcttntctgtgactgtgaagccctgctgttccctgaaaatctgataaatggagcagcnggagggtntttttctttctgggctctngtanaanctcatntggtgttgcaactttggtaattttcccaanagtttgaaaaagggaaagaattggaanctgggaataattggtgtnaaacctattcttggccttaacattnagtggtagccattttttgcaaattt

SEQ ID NO: 724 - DNA, 641 bp, Homo sapiens
  misc_feature 47, 111, 141, 151, 153, 173, 209, 295, 299, 352, 358, 366,413, 436, 462, 469, 474, 479, 485, 487, 493, 499, 513, 534,556, 563, 581, 590, 598, 601, 611, 623, 630, 631: n = A,T,C or G
gcatggaggaatccacaccatgatccaatcacctgccactgggtccntccctggacacatggggattatggggattataattcaagatgagaggagatttgggaagacccnctacattattttgagacaatggggaagctnaaatgtgctnantcgaacctattgggattttnaatttctcgcccattcttaccaaatgttgattttgntgggaggacttcacttgtaaaccagccaaaccccttgcctaagggaaatgggaagagttttgtgccataagcttctggagaaaaantggnaattggtgggtgtttttctctgggggtccgattgattccaggtaaccattgtncagaanagaaaagntgcccaaacatggattttgcaatcaagcccctttgccccaaaaaatnccccccaaaaaaagggtttctanttgggaagaattttgaatgggccaangaaaagncccanaatancttttnanggtttnccaatnacttcggacttgtnacccttgccccggggcggggncggctttttagaaacctaagtngggaatnccccccgggccttggcanggaaatttncaatattnaangccttttttnggatacccgtcngaccctnnaagggggggg

SEQ ID NO: 725 - DNA, 476 bp, Homo sapiens
  misc_feature 187, 192, 204, 322, 428, 434, 459, 462, 464: n = A,T,C or G
gaattggagctccacccgcggtggcggccgcccgggcaggtacacaggattgggtctagaccttgatgcctgggtggagggcccttgtaaggggccatagcctcttcaggaccaactggagggagagttaggaaacaccagctcctgcctggggcagtgagggaatgggagcagctgtgggcgcctnatttnaggcaagtcctncccaaaccttcagatgcagtgagacctggccttcctgttgtgcttttcagactttgttttcagaatgcttttatctcgagtgtgcccttcggccctcacaagagcccctggggagtangtggtggcctgtgccgtcatccccatttcaaagcagggagctgaggtcctgggaggggaaagtgcttgcctgaggtcccactgtgttagttgggtgggcaggactngaactnggttcttcaacaagcccagaagctnaantnttttaacacccc

SEQ ID NO: 726 - DNA, 549 bp, Homo sapiens
  misc_feature 14, 28, 30, 38, 57, 64, 104, 166, 310, 320, 332, 343, 375,391, 397, 470: n = A,T,C or G
accccaagtgtcanctccaactcttgtngnggtctaangaaacctaggaaaagtggncatcttntgttgtaaacatcctgaagcaaaaagaatgccctgtgcangaagactatctatccgtggtcctgaaccagttatgtgtgttgcatgagaaaacgccagtaangttgacagagtcaccaaatgctgcacagaatccttggtgaacaggcgaccatgcttttcaagctctggaagttcgatgaaacattacgttcccaaagagtttaatgctgaaacatttcaccctttccatgccagatatattgcnccctttttgnagaagggagagnacaaaatcaangaaaacaaacctgcactttggtttggagcctncgtgaaaacaccaaangccccnagggcaaccaaaaaggagccaaccttggaaagccttgttaatgggattggatttccgccagcttttttgttanaagaaagttgcttgctaaaggcttggaccgattaagggagaaccctgcttttggccccgagggaggggttaaaaaaaaa

SEQ ID NO: 727 - DNA, 226 bp, Homo sapiens
  misc_feature 39, 51, 61, 62, 64, 67, 69, 72, 80, 81, 87, 88, 89, 92, 97,141, 212: n = A,T,C or G
ttggagctccccgcggtggcggccggcaccttggccgcnttcagagtgccnatgagctccnncngananggnttccgccnnaacaannnacnttttnccccaacgaagaacttcctggagggcgccatggcgctggagccnaggtgcttaaggtcagtgtctcccgcgtacctcggccgctctagaactaagtggatcccccgggctgcaangaattccatatcaa

SEQ ID NO: 728 - DNA, 169 bp, Homo sapiens
  misc_feature 38, 39, 87, 90, 93, 122, 129, 153, 154, 156, 166: n = A,T,C or G
ttagtgagggtttaattgcgccgccttgggcgttaatnnatggttcaataaggctgtttttcccctggttgtgaaaaatttgtttanttnccncttccacaatttttccacaaccaaaccantaccgangcccccggggaagccataaaaaanntngttaaaaaanccc

SEQ ID NO: 729 - DNA, 297 bp, Homo sapiens
  misc_feature 5, 21, 26, 84, 246: n = A,T,C or G
acccngctccaccgtggtggntgccncccgggcaggtacactggtgatttctcaagacaagaagataggcacttaatggcaacntgaaattcctaatattaagcctgatattcttatcattgaatctacttatgggacccatatccatgagaaacgtgaagagcgagaagcaagattctgtaacactgtccacgatattgtaaacagaggaggcaggggtctcattcctgtctttgctcttggaanggctcaggagctgctcttgattctagtatgaagttacctcggccgcttcta

SEQ ID NO: 730 - DNA, 261 bp, Homo sapiens
  misc_feature 24, 32, 33, 37, 44, 110, 146, 166, 177, 185, 201, 206, 212,214, 215, 230, 232, 233, 237, 244: n = A,T,C or G
gaattccgatatcagagctttatngatacccnncagnccctcgnagggggggggccccgggttccccagcctttttgttccctttaggttgaggggtttaattgccgcgncttgggcgtaatcatggttcaataagcctggttctncctggtggtgaaaattttgnttaattcccgncttcacanattttcccaccaccanaccanttaccnanncccgggggaagccantnnaaangtggtanaaagcccctgggggggt

SEQ ID NO: 731 - DNA, 356 bp, Homo sapiens
aggacgcgggggcattgccgaagtggaaaatgatgagatgcctgctgacttgccttcattagctgctgattttgttgaaagtaaggatgtttgcaaaaactatgctgaggcaaaggatgtcttcctgggcatgtttttgtatgaatatgcaagaaggcatcctgattactctgtcgtgctgctgctgagacttgccaagacatatgaaaccactctagagaagtgctgtgccgctgcagatcctcatgaatgctatgccaaagtgttcgatgaatttaaacctcttgtggaagagcctcagaatttaatcaaacaaaattgtgagctttttgagcagcttggagagtacctgcccg

SEQ ID NO: 732 - DNA, 95 bp, Homo sapiens
  misc_feature 55, 61, 79, 81: n = A,T,C or G
agctgtttcctgtgtgaaaattggttatccggctcacaatttccacacaacattnccgaanccggggaggcattaaagngntaaaaagccctggg

SEQ ID NO: 733 - DNA, 429 bp, Homo sapiens
  misc_feature 317, 361, 388: n = A,T,C or G
cgaaaactgatcagactgtctcagatcaaggaaaagatggccagagagaagctggaagaaatagattgggtgacatttggggttatattgaagaaggttacgccacagagtgtgaatagtggaaaaaccttcagcatatggaaactgaatgatcttcgtgacctgacacaatgtgtgtccttgttcttatttggagaagttcacaaagcgctctggaagacggagcaggggactgtccgtagggatcctcaatgccaaccccatgaagcccaaggatggttcaaaggaggtgtgtttatctatccgatcatcctcanaaggtcttaattatgggtgaagctcttgacctgggaacctgtanagccaaagaagaagaatggagagccgngcacccagactgtgaatttgcgtgactgtgagtacctcggc

SEQ ID NO: 734 - DNA, 48 bp, Homo sapiens
  misc_feature 38, 41: n = A,T,C or G
aggaaattcgatatcaagctttatcgatacccgtcganctngaggggg

SEQ ID NO: 735 - DNA, 166 bp, Homo sapiens
  misc_feature 26, 32, 45: n = A,T,C or G
ccaccgcggtggcggccgcccgggcnggtacncggggggcaccancacttggagatttttccggaggggagaggattttctaagggcacagagaatccattttctacacattaacttgagctgctggagggacactgctggcaaacggagacctatttttgtacct

SEQ ID NO: 736 - DNA, 143 bp, Homo sapiens
  misc_feature 10, 26, 30, 62, 74, 83, 84, 93, 134: n = A,T,C or G
acccagcttnttgttcccttttaagngganggttaaattgcgcgccttggcgtaatcattgngtcattagctgnattccctgnngttgaaaanttgtttatcccgctcaccaatttccacaacaaacaataccnagcccgggg

SEQ ID NO: 737 - DNA, 573 bp, Homo sapiens
  misc_feature 55, 151, 155, 199, 228, 232, 252, 258, 260, 276, 296, 310,332, 355, 370, 380, 405, 412, 460, 468, 479, 480, 483, 486,487, 488, 514, 527, 545, 551, 553, 558: n = A,T,C or G
gattgagccctggcaggcatatgcatgcagcactgcctacacagtcctgagtcanaaacttctcatggggtctctgagtctggaatgtctgagttctcaggaggggtagcatttgctgctaaccctctgcctccttagcttgagctgtctntcgnggttttttcccctgatggatgttaacatcttcccaacagagctntcaacccagtgagggaggagtctgtgtanatcncctcccatcattctccatanagtctntntggcccaggttagaanaaaaagacttcttggctcanactccaaagactanagtcagggacagtttccttagnggtgtaaaatggcaagagtagcnctaatctcacagaanactcctgcanaacacactggcacatttcaaccatnaagctgntctcaacagtgtgaagcctgggcaagcacttcccccttttaatggttngacctttngaaaaaatctnnatntgnnngagcccaaccaggggaaagacccttnttgcatttcattnccctggactcctttcaanaaagcnangggcnaaaaccctttttttt

SEQ ID NO: 738 - DNA, 696 bp, Homo sapiens
  misc_feature 272, 302, 356, 382, 461, 477, 479, 483, 491, 514, 537, 554,555, 580, 591, 605, 610, 611, 631, 651, 654, 664, 665, 670,673, 681, 687: n = A,T,C or G
gggcgaattggagctccccgcggtggcggccgcccgggcaggtacattgcagatcccaacattgctaagcttgttcactttcagggttatccatgtgaacttttgcctctgacggtcgcaggtattccatctatgcacatctgtctagatttcatacctgagcttattgcacagccagaacttgagaaacagatatttgctatccagttgctttctcacttgtgtatacaatatgcattaccaaagtcacttagtgtggctcgtttagctgncaatgtcatgggaactttgttaacagtttnaacacaggctaagcggtatgctttttttatgccaactctgccaagtttggtctntttttgtcgagcatttcctccattgnatgaggatattatgtctttgctgatccaaaaagggcaagtttgtgcctctgatgttgccactcagacaagagacattgntccaattattacacgntnttcnacaaatanaaggagaaaccaagtgggatggnctcaaaatctggtaaagattcantctttataaaaatgganncaagggacccctggaagcatgggantccctgaatgnaccctcgggccggntctannaactaagggggagccccccnggcttgcaaggaaattccgntantcaaagcttnntccantanccgtgggnaccttnggagggggg

SEQ ID NO: 739 - DNA, 377 bp, Homo sapiens
  misc_feature 11, 362: n = A,T,C or G
ccgggcaggtncgcgggggcattgccgaagtggaaaatgatgagatgcctgctgacttgccttcattagctgctgattttgttgaaagtaaggatgtttgcaaaaactatgctgaggcaaaggatgtcttcctgggcatgtttttgtatgaatatgcaagaaggcatcctgattactctgtcgtgctgctgctgagacttgccaagacatatgaaaccactctagagaagtgctgtgccgctgcagatcctcatgaatgctatgccaaagtgttcgatgaatttaaacctcttgtggaagagcctcagaatttaatcaaacaaaaattgtgagctttttgagccagctttggagagtacctnggcgctctagaacta

SEQ ID NO: 740 - DNA, 344 bp, Homo sapiens
  misc_feature 56, 144, 177, 190, 235, 300, 301, 334: n = A,T,C or G
gcccggtacccaagcttttgttccctttagtggagggttaatttgccgccgccttnggcgtaaattcatgggtcattagctggttttccctgtggtggaaaatttggtttattcccgcttcaccaatttcccaccaccaaccantaccggaagccccggggaagccattaaaagttngtaaaaagccctngggggtggccctaaatggaggtggagccttaacctcacaattttnaattggcggtttgccgcctcaccttggccccgccttttcccaagtccgggaaaaccctggtccgnngcccaagcctgcaatttaattggaaattcgggnccaacccccc

SEQ ID NO: 741 - DNA, 595 bp, Homo sapiens
  misc_feature 346, 505, 519, 533, 551, 575, 589: n = A,T,C or G
gaagtggcgcctctgagaaaagaaggttggaattatcgtaatttgtttctaggctgagataccagcatggagaaaatgttggagtgtgcattcatagtcttgtggcttcagcttggctggttgagtggagaagaccaggtgacgcagagtcccgaggccctgagactccaggagggagagagtagcagtctcaactgcagttacacagtcagcggtttaagagggctgttctggtataggcaagatcctgggaaaggccctgaattcctcttcaccctgtattcagctggggaagaaaaggagaaagaaaggctaaaagccacattaacaaagaaggaaagctttntgcacatcacagcccctaaacctgaagactcagccacttatctctgtgctgtgctaggaaacaatgccagactcatgtttggagatggaactcagctggtgggtgaagcccaatatccagaagcctgacccttgccgtgtaccttgccccggggcgggncgctctaggaactngtgggatccccccnggcttgcagggaatttcnaatattcaaagccttattccgatnacccgtcgaccctncgaggg

SEQ ID NO: 742 - DNA, 158 bp, Homo sapiens
  misc_feature 3, 8, 25, 31, 38, 46, 48, 59, 62, 65, 68, 72, 74, 77, 85,94, 99, 100, 101, 107, 115, 118, 122, 123, 131, 136, 137,145: n = A,T,C or G
ccnggcangtacctgcacgcctgcnacaccnacctctntctgggcntntattacaaccnaanatnatntggntntgnaaggcgcnagccacttnttccnnnaattgnccgatganaancccnngggctacnagcgnntcctgaanatgcaaaaccagc

SEQ ID NO: 743 - DNA, 173 bp, Homo sapiens
  misc_feature 20, 22, 76, 88, 91, 102, 108, 114, 132, 140: n = A,T,C or G
gccattagcttgaattcctngngacgacaattgggtaatagcggctcaacagattttcctacacgaaccattactnagcccttgggcngcnataaaaagttngtctanagcctnttggggtgttggccctanatcggagnttggaagcctaaaactccagcaatttaaaattt

SEQ ID NO: 744 - DNA, 233 bp, Homo sapiens
  misc_feature 18, 24, 29, 33, 34, 42, 44, 64, 67, 87, 92, 95, 97, 106,107, 115, 117, 127, 153, 155, 171, 175, 182, 189, 191, 196,198, 199, 204, 226: n = A,T,C or G
cgccggtggccggccccnggtacnctggntgcnncctactantngccatattggcccgtggggnggngggggggggactcaaaaaanaaaanaantnttttttttnnttccctgnangaccactggnaaggtcaagctcagaatctattactnanagaatttttccctgcncatntatggtntccccancnactcnanngattnactaattaatgtaactttgttnaaaaaaa

SEQ ID NO: 745 - DNA, 154 bp, Homo sapiens
  misc_feature 53, 55, 67, 127, 133: n = A,T,C or G
ttgaaagaggaaaatctgtggccaaattcaaggcaccctaggctgtgatcctngnactgaacatctngatgagtcaatacagggcacggagtaggactttgaagtcctccattggatcttctcggangatganggaaatgagagagtgtggaga

SEQ ID NO: 746 - DNA, 578 bp, Homo sapiens
  misc_feature 281, 324, 456, 505: n = A,T,C or G
tgcatagactagtcagcttctggggtgactagagcagggctgttgtctcctcaagcttcagccgtgcgtggactggtcagcttccggagtgaccagagcagggctgttgtcatctcactggcaccttggttccatcgtaggatcagctgggttgcatggtctaggtcctgttggctggtccacttgtcctgggctgctggtttcagctgactggatggatggatccaaggcacaattcctgcaacatttctaggcttccaagtgggtccctggcgtcttanctgtgggatctcccaatacctgcaggtaaacgaaggcccacangaagcctgggccctctagggagccaggaaagacacagtagccagttgaaagactacacccaagaagcctcccggcttgccgccagaagacaaaaggccccgcccccccgcgttaccttcggccgcttcttanaaactaagtggggaatcccccccggggcttcaaggaaatttccgaatantcaaaagccttattccgaataccccgtccgacccttcggaaggggggggggcccccggtacccaaactttttt

SEQ ID NO: 747 - DNA, 620 bp, Homo sapiens
  misc_feature 68, 69, 70, 72, 73, 74, 76, 85, 87, 88, 89, 94, 95, 96, 102,106, 118, 123, 124, 126, 140, 141, 145, 146, 148, 149, 153,154, 157, 168, 169, 177, 178, 181, 188, 196, 197, 198, 201,202, 205, 211, 217, 218, 226, 229, 232, 233, 234: n = A,T,C or G
  misc_feature 235, 248, 258, 263, 273, 276, 278, 279, 291, 294, 301, 310,312, 317, 335, 336, 337, 340, 341, 350, 357, 363, 364, 366,382, 387, 388, 389, 390, 392, 401, 403, 404, 405, 412, 419,422, 423, 426, 428, 429, 430, 432, 456, 464, 470, 471: n = A,T,C or G
  misc_feature 485, 486, 487, 496, 502, 504, 505, 507, 508, 510, 512, 513,516, 517, 518, 522, 535, 536, 541, 543, 553, 555, 557, 559,564, 565, 579, 581, 584, 585, 586, 592, 604, 608, 610: n = A,T,C or G
ttttttttttttttttttttttttttttttttttttttttttttttttttttttttttttttttgggnnncnnncntttaaaaancnnngggcnnnaagggntttnaagggtttaaanccaannancccatttttttaanntttnnanncccnnggnttaaaaaaacnnaatttttnnaanaattttngggcaaannnacnnccnttttcnaaaaanngttttccnccnggnnnntttccgggcattncttttcctgnttttnaaagggcttnttntnnaaaaaaaaaacnttnccccacnatggattcnanggggnttaattcccccccgcttnnnggnnccttgggtngtccccnaaaatnngngcccccaaaaatcccnggggnnnntngggggtggntnnntgggggnaaaaatngtnnttntnnnancctaaaaatcttttttttaaaacntaaagggnccccanntttcttctggggannnaaaaaaaancccccncnnannanannaannngggntttttttaaaaannaaaananaagggccccntntntnaaaannttgcaaaaaaaaangnaannngggggngcaaaatttccntttntngggggggggg

SEQ ID NO: 748 - DNA, 597 bp, Homo sapiens
  misc_feature 3, 20, 21, 26, 28, 30, 31, 40, 59, 65, 67, 71, 73, 77, 78,81, 153, 159, 160, 166, 168, 201, 226, 234, 246, 256, 257,272, 278, 287, 293, 297, 302, 307, 328, 329, 330, 333, 339,342, 343, 345, 347, 349, 359, 361, 362, 365, 368, 371: n = A,T,C or G
  misc_feature 374, 375, 376, 382, 384, 386, 389, 396, 400, 406, 413, 414,416, 437, 438, 448, 461, 463, 474, 488, 509, 519, 531, 534,537, 541, 543, 544, 545, 546, 548, 557, 559, 574, 576, 579,580, 581, 583, 591: n = A,T,C or G
tcncctttacttggaaggcnnccctngngnnggacccatncatgattcagatcaccagnaagggngncctncnctcnnttntggacatgcatgtcaacgttggtgggagaagctatgtgccgggaaaaatgaaaggcagaaaggccaggaggnctgtanngccctnanacatggccaagaaaactttcaaccccatccaanccattgtggacaacatggaatgtgnaaccaaantccaaaacaaanccatgatttnncctgctccattgggngacccnacttgtgcnttcggnaacnctggncatancaggaacctcgtggaaatttnnnccncgtctnttnnantnantgcccctganannacngtngcnatnnntatctncngngcntttgccncccnattccnttcgggnntnttcttattcccaaatccgggnnagggaagaanttggctttctttntntacccacttgntccctggagggcanccccccttaagaaagctttangggaacgttnatttctttgacncangtngggntnnnnancccaatgcntntttgaaccctttttngnttnnncntgtggttngggccc

SEQ ID NO: 749 - DNA, 673 bp, Homo sapiens
  misc_feature 14, 17, 27, 63, 217, 221, 268, 299, 333, 347, 351, 410, 413,451, 453, 458, 463, 468, 470, 485, 490, 514, 535, 576, 583,597, 607, 627, 642, 661: n = A,T,C or G
aggtacgcgggatnganaggttgaccntgtgataccgcgggacagttcacatagacatcaganaatttattccagaaaggagcctcctgaatgtgatgaatacggcaaagcctttaatcacatctcagcccttagcatcggaaagcttatactgtaaataaacttgatgaatattatatgtgaggaaaactttcatgtatagcactcattgcttcanacanaaaatgaattccgtcggtatgttccaatctgtgatgaaattttgagnaaacattgccaaggagggagctcaatcttgngccgggcgcagttgggcttcacgccttgtaatcngcagccactttggngagngcccgagggcatggcgggatcaccggaggtcaagtttgtttcggaaggacccagccctnggnccaacaatgggtggaaacccttgtcttcttacttgtgnanacaangattnatgtnanaacattatttataangggtnccctgccccgggggccgggcccgnttcttaaaaaaaccttaggtngggaattccccccccgggggccttggcaagggaaatttccnaattttntccaaaggcctttntttcggaatnccccgttccgaacccctccnaaggggggggggggncccccgggttcccccaaanctttttttgggt

SEQ ID NO: 750 - DNA, 591 bp, Homo sapiens
  misc_feature 19, 36, 38, 40, 44, 49, 51, 54, 67, 73, 76, 79, 81, 88, 89,93, 96, 98, 103, 113, 124, 125, 131, 137, 140, 148, 151,152, 159, 160, 161, 165, 166, 171, 174, 177, 184, 190, 191,202, 203, 207, 209, 213, 215, 217, 223, 227, 229, 237: n = A,T,C or G
  misc_feature 243, 263, 269, 276, 283, 290, 293, 298, 307, 313, 316, 317,320, 323, 326, 333, 345, 352, 358, 371, 372, 373, 375, 377,382, 387, 388, 390, 394, 395, 405, 406, 407, 411, 415, 416,427, 442, 450, 455, 456, 470, 472, 498, 510, 513, 527: n = A,T,C or G
  misc_feature 531, 532, 536, 539, 545, 546, 550, 564, 565, 573, 575, 580,581: n = A,T,C or G
ttttttttttttttttttntttttccccaacaaaancngnttgnttttntngcngggaacctggganggaatnggncancngggggtnnccgnagnanccccntcccccggcntgactgccaanncccagntttgtntgnaacccagnggnnggatcannntccnnccccnttnggnccatccngggggnnggggggaccanncccntntttntnanggccangggngnaaacagtntttccngtttttttaagggttgcaancaaagngcccatnctgggcnaaaattnaangcaancctttttgnggggcnggnnaangtnatncttaacncccccaagcttnttggggncccganaaacagtttaaannnancntccanaggtnntntccnnaaaaaactcnnncttnggcnnaactgaggcancggcgtttttggccncttttttngcggnngtttaaaaaaaacncntttttttccccgggtaccttggggcnggttttaaaaanttnggggggatcccccngggnntggnggnaattcnntttnaaaggttttttggnncccccgcnancctgnngggggggggc

SEQ ID NO: 751 - DNA, 461 bp, Homo sapiens
  misc_feature 215, 237, 243, 247, 264, 270, 283, 295, 305, 312, 316, 319,377, 382, 384, 390, 395, 398, 406, 435, 446, 449: n = A,T,C or G
aggtacaacattggtgtcctaagacaccttcaggtcatctttggtcatttagctgcttctcgactgcaatactatgtgcccagaggattttggaaacagttcaggctttggggtgagcctgttaatctgcgtgaacaacacgatgctttaagaattttttaattcattggtgggatagtttaagatgaagcctttaaaagcttttagggacatcncaggctatgctaaggtaaaagntcttangganggtttccttttgcctgnatcagnaaggaatcttgcncatagggcttgnccccacattnggtaccntgcnccngggggccgggcccgcctcttaagaaaccttaggttggggattcccccccccggggccnggccnanggaaantttcnggnattattcnaaaagcctttaattccgggattaccccgntcctgaacccnttnggaagggggggg

SEQ ID NO: 752 - DNA, 157 bp, Homo sapiens
ccgggcaggtaccacctcaacatttccttgtgctgaagctatactgaggactgtcctaccttcactatcaatactatccacagctgcaccccaaaacaaaagtgtatttacaactgatgcatgacccatagacgctgctgctaagaggggtgtacct

SEQ ID NO: 753 - DNA, 271 bp, Homo sapiens
  misc_feature 67, 88, 111, 132, 153, 190, 206, 216: n = A,T,C or G
gttaaattgccgccgctttggcgttaaatcatggggcataagctggtttcctgtggtggaaaaattngttaatcccgcttcaacaaanttttcccacaacaaaaccattancgaagccccggggaaggccantaaaaagtggttaaaaagccncttgggggggttggcccctaaattggaagttgaaagncctaaaccttcaacantttaaatttngccgtttgggggccttcaacctgggcccggctttttcccaaagttcggggggaaa

SEQ ID NO: 754 - DNA, 484 bp, Homo sapiens
  misc_feature 376, 414, 437, 475: n = A,T,C or G
tccaccgcggtggcggccgcccgggcaggtacgcgggggcattgccgaagtggaaaatgatgagatgcctgctgacttgccttcattagctgctgattttgttgaaagtaaggatgtttgcaaaaactatgctgaggcaaaggatgtcttcctgggcatgtttttgtatgaatatgcaagaaggcatcctgattactctgtcgtgctgctgctgagacttgccaagacatatgaaaccactctagagaagtgctgtgccgctgcagatcctcatgaatgctatgccaaagtgttccgatgaatttaaacctcttgtggaagagcctcaaaatttaatcaaacaaaattgtgaagcttttttgagcagcttgggagnagtacctcggcccgctctaagaacctagtgggaatccncccggggcctgcaagggaatttncgatatcaaagctttatcgaatacccggtcgaccctcnaaggggggg

SEQ ID NO: 755 - DNA, 469 bp, Homo sapiens
  misc_feature 14, 22, 25, 38, 75, 88, 91, 103, 128, 135, 175, 214, 216,217, 220, 231, 238, 239, 241, 270, 311, 324, 336, 350, 371,378, 406, 407, 415, 454: n = A,T,C or G
ttccaaggccctgnggggaaanttnttattaattcaantgacaaaatttgtgttaaagtggccttcttttaaggnacagacaatagtnaanaccttgactcangaggctgtcttccttggggagactnttggcanaacatgagcattgaccagaatttcaaagggaaaggggcanggaccggggggctcttaaataaaagaagggggagggttnannttngtttaattggngccattnntncagggaaggggttgaaagaataaccttcnccccccaggggggtcctccaagggaaaggggcttggggggngccttttggttanaaaaaccttgangaatggtggccaanggaagaagaaaccattctttnttaaaanaaatgggccattgcctttggggcttggnnccgccaanttggggccttcaaccaccccttggtaaaattccccaagntgttgtttccccggg

SEQ ID NO: 756 - DNA, 567 bp, Homo sapiens
  misc_feature 18, 34, 192, 281, 336, 356, 411, 450, 456, 491, 499, 518,526, 531, 536, 542, 554: n = A,T,C or G
ttgacctgctaatcaagncacacatggtgagcgnggactttccggaaatgatggcagagatcatctctgtgcaagtgcccaagatcctttctgggaaagtcaagcccatctatttccacacccagtgaagcattggaaaccctatttccccaccccagctcatgccccctttcagatgtcttctgcctgttntaactatgcactactcctctgcagtgccttggggaatttcctctattgatgtcctcggccgcccgggcaggtaccccgggggacagatnctattattatttccattctaccgagaaggagactaaggctctgatcatttaaatnagttgcctaaggtgatgcantgatataagtagcagagctaggaattgagccttggtaactttaactctggacccnaagtccttagctactaagcttttactgcatggggttttnagtcanaattaaaaaacttttttggaatatggagggtaacntttttggngaattagccttttggtggntaattttntttgngcctnatttgncccaacaaaagnctaatttttattt

SEQ ID NO: 757 - DNA, 229 bp, Homo sapiens
accagcctttgggaagtcgtgtgaatacctcggtctcttagccacagggatagaatggcggcctgacggagccgcggcgccggcgaagtcgctgaggcgcgagctggaacccccagaccagctcaaacgggagccaaaactcgaagcttggaagaattagcaggaaatggcggatgaggcgttgtttttgcttctccataacgagatggtgtctggagtgtacctcggc

SEQ ID NO: 758 - DNA, 60 bp, Homo sapiens
cgcgcttggccgtaatcatgggtcataagctgtttcctgtggtgaaaaattggttatccc

SEQ ID NO: 759 - DNA, 402 bp, Homo sapiens
accatagttgaagtcttcaacaatcccattaaacttcaagcagaatggcctccacttctctttggctgattctgacttgagttcttctgggtccaacacatctatcctaagggtctcaaaatttttccggaactcagagtaaatttggtcatctactttggtgagtttcaggaactgtgggtcaactgatgaaatcagcttgtaatagacttcagcatgctgcattgctctcatggcccaagccatctcaatgtcaggatcgttgccatacgactctgctgggagagaaagcgcatgtgccacagacaccaactccccggaaaccggctcatcagttccactggtggccgccatcttgcaacccccgaaagcgtggctccttccgcagctgattgcccgcgt

SEQ ID NO: 760 - DNA, 352 bp, Homo sapiens
  misc_feature 50, 53, 74, 84, 121, 123, 170, 173, 189, 198, 215, 227, 248,283, 284, 291, 314, 316, 318, 326, 327, 331, 340, 347: n = A,T,C or G
cgggctgcaggaatttcgatatcaagccttattcgataccgtcgaccctngangggggggccccggtaccccanctttttgttnccttttagttgaggggttaattgcgcgctttggcgtnantcaatggggcatagctggtttcctgtgtgaaaaattggttattccgntcncaatttccacaacaancatacgagnccgggagcataaaagtngtaaaagccctnggggtggccttaatgaggggngccttactcacaattaaatttggggttggggcttnntgccccnctttttcaagtccgggaaaaccntntncgtgcccnncctngcatttaantgaattngggca

SEQ ID NO: 761 - DNA, 462 bp, Homo sapiens
  misc_feature 365, 368, 432, 435: n = A,T,C or G
tcgaggtacttgtgacaggcagacgtgattgcagccacgaacacgatgaactcactgaagtccacctgggcatctccattggcgtccaggtccttgagtaatttatccacggcatccttgtcttttccactctgcaggaagcctggtagctccttctccatcagcaccttgagctcccccttggtcagggtctgcgtgctgccctcgctgcccgaatatcgggaaaagacgtctatgatcatgcccatggctgtctctagttcccgtcatggtgctagattcaagacccaccttcctcctggggggctggcagggcccgagaaaatgtcccccgcgtaccctgcccggggcggcccgcttcttanaantagttggatcccccgggctgcagggaaattcggatatcaaagctttatccgatacccgtcgacnctngaggggggggcccggtacccaagcttt

SEQ ID NO: 762 - DNA, 339 bp, Homo sapiens
aggtacttgtgacaggcagacgtgattgcagccacgaacacgatgaactcactgaagtccacctgggcatctccattggcgtccaggtccttgagcaatttatccacggcatccttgtcttttccactctgcaggaagcctggtagctccttctccatcagcaccttgagctcccccttggtcagggtctgcgtgctgccctcgctgcccgaatatcgggaaaagacgtctatgatcatgcccatggctgtctctagttccgtcatggtgctagattcagacccaccttcctcctggggggctggcagggcccgagaaaaatccccgcgtacctgcccg

SEQ ID NO: 763 - DNA, 196 bp, Homo sapiens
  misc_feature 47, 139, 149, 151, 155, 164, 166, 170: n = A,T,C or G
attgggtatcccggtcacaattccacacaacataccgagcccgggangcataaaagtggtaaaagcctggggtgcctaatgaagtgagctaaactcacattaatttgcgttggcgcttaactgcccgcttttcaaggcngggaaacctngnccgngcccacctngnattnaatgaatcggggccaaccccccgggg

SEQ ID NO: 764 - DNA, 32 bp, Homo sapiens
  misc_feature 2, 15, 22: n = A,T,C or G
ancaccattcttagnggagcangattcttgat

SEQ ID NO: 765 - DNA, 388 bp, Homo sapiens
tccaccgcggtggcgtcccagccactcaggaggctgaagtgggaggatcgcttgaggccgggattcgaggctgcagtgagttgtgatcatgccaccactgctctctagcctgggcaagagtgagactccgactcaagaagagaaaaagaaaaaccttccaggggcacatttatttgtaaaccattccagaggatagaaaagagatgtaaggctccctaattcattccatacggttagcgtaatccttatagcaaactgcacaaataaaacacaaggaaaactaaaccaaattcaattaatgtaggtgcaaaaaatccaaaataaaactagcagtttgaattcagcattgtagcaaaagatatatcattttcaaggaagatttgtacct

SEQ ID NO: 766 - DNA, 106 bp, Homo sapiens
  misc_feature 4, 37, 61, 65, 67, 68, 70, 74, 94: n = A,T,C or G
accncggtggcggcccgaggtacagtgtccatgtgtntacctgatactttcacatgtcatnaaantnnangcanccagacacaagtagccatgnatcttggcacat

SEQ ID NO: 767 - DNA, 66 bp, Homo sapiens
  misc_feature 4, 19, 39: n = A,T,C or G
ctcntataggcgaatgganctccccgcggtggcggccgngtccttttttttttttttttttttttt

SEQ ID NO: 768 - DNA, 398 bp, Homo sapiens
cccttagcgtggtcgcggccgaggtactgatgggacagcagccagtgccaccgtggccatagcaggtatccatttccaatggtataacttgtctgccttggagcagcacatttctgatgccctgggtcaacatttcagattgtaatgaatgtcaaacaactgttactgagattcttgtctgatattccctacaccttttttctagagaggagcatactccagtattttgattattctcttcataaaggatgggatatgctcatttcatctattcaaatttttagattaacttaagatagctaaaaatttaaatatctaaaatgctgccaaaataaaagagaaaacacatttggctttactctctcaactttgtatgtgagagagaacattcctgtgtt

SEQ ID NO: 769 - DNA, 390 bp, Homo sapiens
accacaatcacaaatgcagcactgtttactgacaggaccattactctgtcaaaatcagcacatcaaaaatattatcctggaatctaaaatagtagtcaactgggttgttaaagcaagggattgctatagatctacaggacaaagttccatagtgaaacacaaactcctgggttagtcctaggccaggcaggtgaccataaatgttcacattctggtagaatcccattttctaaaaattatacaaacacatcgaaatcactagattttatatatatatacacacacacacacttatgtgtatatatacatatacgtattttgtgtgtgtgtgttgtgtttccagcagctaatagcagctaacatttattgagcacttaccacatgccagga

SEQ ID NO: 770 - DNA, 402 bp, Homo sapiens
ccctttcgagcggccgcccgggcaggtactcagctggctgcatcacttattttcctttcagacctgtctcctgtaggtagccatgcttgtgtccccaaaactatactgtcttcctaatcttttcttccaaatgaaaatcgaccacccaaacccaaatttcttaagcaggttacaaaaatgtttaaaccaagttatatataaactgcagtcatattctccagaaatacaaattaatatggcatctagtttactccctctctttggaccccagttccaccttgctttcactctcacaggctttctccttggcaaagcaaatttaagaatgaaactctatacacaacctcttttttcaatggtgctactgtattcccctcttcaagggttagagagtttttctac

SEQ ID NO: 771 - DNA, 426 bp, Homo sapiens
ccctttcgagcggccgcccgggcaggtacacgtgtgcacgcacatgcacatgaacacaggaatgttctctctcacatacaaagttgagagagtaaagccaaatgtgttttctcttttattttggcagcattttagatatttaaatttttagctatcttaagttaatctaaaaatttgaatagatgaaatgagcatatcccatcctttatgaagagaataatcaaaatactggagtatgctcctctctagaaaaaaggtgtagggaatatcagacaagaatctcagtaacagttgtttgacattcattacaatctgaaatgttgacccagggcatcagaaatgtgctgctccaaggcagacaagttataccattggaaatggatacctgctatggccacggtggcactggctgctgtcccatcagta

SEQ ID NO: 772 - DNA, 426 bp, Homo sapiens
ccctttcgagcggccgcccgggcaggtacctatgaccatcttacattatttttatgggtggggggcattgactgtggaatgtgggcagtaacttgcacagtcagtaaccgtttgagtaacttcttgttggcatccccattctggcactcctcctctaggtctccacctcacacgctggtttgtgggcggaggggcaggttggtgcgtggggtgtccgggcactggctgtgcatgccttcttcctcttctgtctcttggccaccttttccaaaaagtcaccagtgaccaattctcccagtgtttctttgggactcaatgccttgggcttggcattgggtaaagccaactggccagtttcattctgacgagctctatagtagtccggtgtggacctctgccctccctgctctgcggaagcttcctcag

SEQ ID NO: 773 - DNA, 304 bp, Homo sapiens
acgcgggaggctgtaggagaacaatgaaagggaggatgaagagatgggtaagtgagccatactcaagggcacatggtgtttcaaaaacacctcccactatttggcttttatccttgaaagagagctcataagaaagtttcaccaggcccactgaagtagaaaagcataataatatacttggtgagtaatctaacttctttttctccaaaggctagtaatcacctataaattaaaataaagcacttaagttttatagcaaaaaacaaacaaactggcgattttcactaaaaccaaaaaaaaaaaa

SEQ ID NO: 774 - DNA, 359 bp, Homo sapiens
ccctttgccgcccgggcaggtaccatccctctcctgagctagacaattatcctttgggtagtgtgaaactgagtgtctctggactcaggacagtgtgcaaacagtggggttaagacataggttcatgtatttaattgaagactccctgctttctctttcggacttgtctcccacacaatagcagccagatgtttatctctaagcagcaactggaattttctctgtggtatctgactagtctaagaggaataaaagaccaaagaagctggcattgtggctccccaaggaaatggcctaatccattattctaacagtggatgaacccctttcgtgtacctcggccgcgaccacgctaaggg

SEQ ID NO: 775 - DNA, 418 bp, Homo sapiens
ggtacctgttacctgagtcaacagatccagatgagaggtgtaggcaggagggtcatctctgtgcatttaggaaaagcagcactgatgctagtagagcatccagttccccaacatgatcacccctgaagccttaattcccaaatccttccaagccttatctgtaggggcttaatgaggacagaaaggaagaaacagtcactctggcacaacaggacaatatattcagattaaatctgaaaatggtggaggcctgctgcccatgaattctgagcctctccaaccctggtcccataatgaaactagtagtagggtcttccaaatggcattagacaagggttccatctgtgtaaggaccactgggagttagactggacccaggatggtatgccatgtgcagccatgtcaacccccaatttgc

SEQ ID NO: 776 - DNA, 212 bp, Homo sapiens
  misc_feature 116, 157, 160, 163, 187, 189, 196: n = A,T,C or G
acgcggggatttaaaaaaaaaacaacacctatataagggagtgatctaccataataagataacagaaacaacaaatgaaaatattagtaccctctccctgaaaatttgagtaatanattattctgaagtactgtacttcattaaaaaaaaaaaaaanatnacnttccttgtaaaattaccgttgttntntgtcccnccaaaaaaaaaaaaaa

SEQ ID NO: 777 - DNA, 415 bp, Homo sapiens
ccctttcgagcggccgcccgggcaggtacgcctcacccaactcaactcttcacatagctcaagtcttggcataaatgatatttctcaagagatacattttctgaccactttatccttgtctttccttcataattaatccataacattatgcttgttagcttccttcatggtatatatcatagattgtcatcatatattaatatgtttgtctatagactgtctctcatattatattctaccaatatgagtgcagcatccatataccatagacctagcatggtcttagataactaagatcaaataaatacaaaagttcaagggcaaataataacgataataattaggattctcaaaagcataaaggtatgtttttaaaactctcaggtattaataaaaatcaatacccaaaattcta

SEQ ID NO: 778 - DNA, 305 bp, Homo sapiens
acgcggggtcacctgctgtgctcttgcttgcacagtgtcctggagctggacctggctctgggtttccaggaagcagtttgactaaaggcagcaagctgcttcctctgctgcctgagataccagattcccaatggcgaagattgagaaaaacgctcccacgatggaaaaaagccagaactgtttaacatcatggaagtagatggagtccctacgttgatattatcaaaagaatggtgggaaaaagtatgtaatttcaagccaagcctgatgatcttattctggcaacttacccaaagtcaggtacc

SEQ ID NO: 779 - DNA, 474 bp, Homo sapiens
  misc_feature 1, 65, 130, 232, 290: n = A,T,C or G
ngtacttataggcaataaggcgagtctaagacctaaactagataatttgagaacagggaaaaaanattccatttcgattcctgaaggttacccccatacctattataacagaataaaataaaataattcnaaactgcacaacctctaacttatcaaatcctatatatgcctcattttctcaaatgactcctaatttgtgtaaagaaaaaggcaaaaagagaaaggacagaantatgtcaaggtgggctaaagctatgaatacccttttatgtaaactaagaaaaaaatanatacacacgcattttttaaaagggaactttttgaaaccttgagccgcaaagaggaaaaattcctggctaaattgcaccactcaaagacaactagacttacggtcataaatttcttctccaacccatttctttcaggattcttacagatccatagcattttgcaagctgacataggaccctttca

SEQ ID NO: 780 - DNA, 338 bp, Homo sapiens
  misc_feature 310: n = A,T,C or G
ccctttcgagcggccgcccgggcaggtacgcgggtaaatcgaattaaactaaattaaacatttttctttcattagtaatattaaaacacttaaagctacattgagtgatagcaaattagtaaagcctattaagtcttctatgtaaagtatgattcagaaatatatattttatatatatatgcatgatctcggctcaccgcaacctccgcctcccaggttcaagcagttctcctgactcagcctccctagtagctgggattacaggcatgtgccactacgcccggctaattttgtatttttagtagagacngggtttctccatgttgttcaggctggtc

SEQ ID NO: 781 - DNA, 293 bp, Homo sapiens
  misc_feature 1, 65, 79, 89, 182, 199, 204, 227, 245, 264, 265, 285: n = A,T,C or G
ncgcgggaggccatctcgctataggaaaggaaagtggaacagcattcatcctcaacatttttacnaagacaaaatgaanactggagtanaagactgatcagtgcaggtgtagcataaaagtgtaatcctggaagatgtggtgtgagaaggtagcacaagtgaagcagagatacaggagatanggaagggaagctggaancagangtcactggagggagagggagatngacacattcagggctacnaagcaagttctatgtgatnngctcacctctcaattgtggngacccctc

SEQ ID NO: 782 - DNA, 360 bp, Homo sapiens
ccctttcgagcggccgcccgggcaggtacctcttattccagagaagtggggagcagagaggaagatggagtggaaaggggcgagacaaggccctcctgaaatacctcaacccaaatcttcaagaaatccccaagtccccacagtgctttttgtggatttttgtggaaaccggtaaaaggggctgatttgctggccccagtgggtagaaaacagagactgtcaagagaacagaagagaaggcagaaaggggatggggaagtggggttcgccatgttcacgagctcctggagccacagggccccccaggaacaacagagctgagactgggtggccttgtttctggcccaattccctgggacc

SEQ ID NO: 783 - DNA, 670 bp, Homo sapiens
  misc_feature 201, 240, 242, 277, 331, 340, 343, 367, 370, 372, 376, 382,399, 406, 407, 444, 451, 466, 468, 475, 477, 479, 495, 501,505, 508, 519, 520, 524, 525, 533, 538, 544, 547, 552, 591,606, 609, 628, 630, 634, 654: n = A,T,C or G
ccctttcgagcggccgcccgggcaggtacgcgggaatgatttatttgagggtttggtacatcttatacaaccgtgaatacaatttgcatctaataatgtgacttcagtagtatcatgatttttgtccaaaccttctcagtctgggaaacatttaaagagaataatgaccttagagaagagctggatttcttttaagacttntattcagatcaggacacaatcacgttcaaaattgacatnancatgtaacatggatttcagtgaagaaaagtacttnagaatcaaattttagaagagtgttttaaggtttagtggccctaatcaaaaggangtcaaaaanctntttttttggttaatccattagggnggngngganccaccnggggttttggcctcttnggttttnnttttgaaatttggcccagggggctacctttggtccanttttttngggggaagggaaatnanattgggncncnaaaaacttttgggggnaaaaanttanaanaaatttttttnntttnncttttggnaaagncctttnccnggccntttttttaaaaaaaaaattggcctttccgattttttttnaaatttaaaaatttnggnttttttttttggaaatttngntttnaaaacttgggggttcttttncccccctttttttttt

SEQ ID NO: 784 - DNA, 317 bp, Homo sapiens
aggtacgcgggggacctgctgtgctcttgcttgcacagtgtcctgggagctggacctggctctgggtttccaggaagcagtttgactaaaggcagcaagctgcttcctctgctgcctgaaataccagattcccaatggcgaagattgagaaaaacgctcccacgatggaaaaaaagccagaactgtttaacatcatggaagtagatggagtccctacgttgatattatcaaaagaatggtgggaaaaagtctgtaatttccaagccaagcctgatgatcttattctggcaacttacccaaagtcaggtacctgcccg

SEQ ID NO: 785 - DNA, 398 bp, Homo sapiens
  misc_feature 47: n = A,T,C or G
tagctgtttcctgtgatggtaaaaggaccgtccaccgcggtggcggncgcccgggcaggtacgcgggaatgatttatttgagggtttggtacatcttatacaaccgtgaatacaatttgcatctaataatgtgacttcagtagtatcatgatttttgtccaaaccttctcagtctgggaaacatttaaagagaataatgaccttagagaagagctggatttcttttaagacttctattcagatcaggacacaatcacgttcaaaattgacatagcatgtaacatggatttcagtgaagaaaagtacttcagaatcaaattttagaagagtgttttagggtttagtggcctaatcaaagggagtccagaagctatttttggataatacataggaggtag

SEQ ID NO: 786 - DNA, 316 bp, Homo sapiens
  misc_feature 8, 16, 63, 114, 310: n = A,T,C or G
gcgcgtcntggcggcntccgccaactgattgggcgaaccgtccaggtccagcttgccgtgcancaggctgagactggccgcattcgcgccgccgccgcccaggctgtcgaacanattgcccgacaggccggccgagaagccgcggatcgtgtaattgctgctggtggcgccgtttgcctcgttgtcgaaacgcttgtcgtcataattgagttgcagatacagattgcgcaggcgcgagcgcagcagcgggtagctggcgtcgacgcccagcgtgttcgaactgcccttggcgtgcaaggcggcaaattcntcggcc

SEQ ID NO: 787 - DNA, 406 bp, Homo sapiens
  misc_feature 403: n = A,T,C or G
acacgtgtgcacgcacatgcacatgaacacaggaatgttctctctcacatacaaagttgagagagtaaagccaaatgtgttttctcttttattttggcagcattttagatatttaaatttttagctatcttaagttaatctaaaaatttgaatagatgaaatgagcatatcccatcctttatgaagagaataatcaaaatactggagtatgctcctctctagaaaaaaggtgtagggaatatcagacaagaatctcagtaacagttgtttgacattcattacaatctgaaatgttgacccagggcatcagaaatgtgctgctccaaggcagacaagttataccattggaaatggatacctgctatggccacggtggcactggctgctgtcccatcagtacctnggc

SEQ ID NO: 788 - DNA, 321 bp, Homo sapiens
aattggagctccccgcggtggcggccgaggtacgcggggggccggagccgggccgggcagctagcagggcgcttcggtcttaggtatgtctttatcagcagcataaaaacggactaatacaagtacacaagaatacaaagaaaagaacagcagacactggggcccgcttgagggtagaggatggaaggaggatgtggatcaaaagcctacttatcaggtattacgcttattacctgggtattgaaataatctgtatactgaacccctgcaacacgcaatttacccatataacaaacctgcagacgtacctgcccgggcggc

SEQ ID NO: 789 - DNA, 448 bp, Homo sapiens
  misc_feature 29, 31, 32, 36, 37, 43, 44, 59, 60, 74, 79, 84, 85, 91, 103,104, 121, 124, 127, 128, 134, 141, 142, 143, 145, 149, 150,152, 153, 154, 157, 158, 161, 168, 178, 179, 180: n = A,T,C or G
gattggagctccccgcggtggccggccgncnngacnngtactnnattcacgcctgcacnngtttaaagcctgtnttatntatanntgtccngtcatggggggnnctttgactcttatgatncantgnngaaacntggattnnntntccnntnnnctnntgntgggganatgctttctnnnagtgacggcaatggaaatatcaagcaaccaagggaaatctgaagatcccagagagcccagcaagcagcaacatcctcgagttaggcaagcaagggcccggagctggccagaccatgggctggaatgcagtgggggccggtcagaggggcttcttctggggtcctgactgtggtttctgccagaggtggagcaagttggaactggatgttgagtgaagtttcaaagaacttaaaagtcaaatggggaacaataatcaaaggcttccatt

SEQ ID NO: 790 - DNA, 316 bp, Homo sapiens
cgaggtacgcgggacctgctgtgctcttgcttgcacagtgtcctggagctggacctggctctgggtttccaggaagcagtttgactaaaggcagcaagctgcttcctctgctgcctgagataccagattcccaatggcgaagattgagaaaaacgctcccacgatggaaaaaaagccagaactgtttaacatcatggaagtagatggagtccctacgttgatattatcaaaagaatggtggggaaaagtatgtaatttccaagccaagcctgatgatcttattctggcaacttacccaaagtcaggtacctgcccg

SEQ ID NO: 791 - DNA, 332 bp, Homo sapiens
aggtacatggtctttgaactctcgtgtcgaaagagttgaacacaactaaactttaatgtgaaaaggtctcaagtagttaatcagaaatgagaggcgcacatagcattttatactgttttcgatttgctgacacaacatcattctgtgctctctagtgagcaagagtaatcctcaatagcattaagacgaaaggctgaacacaaaaccgcaggcaagtcaagtagtgattttattctttttgtcatttttctttcaagtggaagatccctaacactctctgctcctgacaatgtttataaacagaactctgagaagcatctgaatgtaaaaaa

SEQ ID NO: 792 - DNA, 374 bp, Homo sapiens
aattggagctccccgcggtggcggccgcccgggcaggtacgcgggtattaaatttccaatgtgatgtggcttctgtttggatagagatggagctggtctatgtttctttactctgtgttcatagtatcaaagtaagctttgtatctgtttttctgtaatgatgacatttacacttggttgcattaatatgaagtaacatggattgcgtgtgttagtaggttctttttaattactgtgtaaaaataatatgtaattgaaacaaaaagcattgtttccaatcctaattttttttcctcaagtccatcctgtcaagctgcaagcgtgaaagttattttctggtggtgtgattagattggggctgaaccctccagctg

SEQ ID NO: 793 - DNA, 298 bp, Homo sapiens
acctgactttgggtaagttgccagaataagatcatcaggcttggcttggaaattacatactttttcccaccattcttttgataatatcaacgtagggactccatctacttccatgatgttaaacagttctggctttttttccatcgtgggagccgtttttctcaatcttcgccattgggaatctggtatctcaggcagcagaggaagcagcttgctgcctttagtcaaactgcttcctggaaacccagagccaggtccagctccaggacactgtgcaagcaagagcacagcaggtccc

SEQ ID NO: 794 - DNA, 349 bp, Homo sapiens
aggtacctgactttgggtaagttgccagaataagatcatcaggcttggcttggaaattacatactttttcccaccattcttttgataatatcaacgtagggactccatctacttccatgatgttaaacagttctggctttttttccatcgtgggagcgtttttctcaatcttcgccattgggaatctggtatctcaggcagcagaggaagcagcttgctgcctttagtcaaactgcttcctggaaacccagagccaggtccagctccaggacactgtgcaagcaagagcacagcaggtccccgcgtacctgcccgggcggccgctcggctctagaactagtggatcccc

SEQ ID NO: 795 - DNA, 247 bp, Homo sapiens
gattggagctccccgcggtggcggccgcccgggcaggtacacaaaacagagatgcacaactaccctaccacctgggcaagaaacgggctgccacctggcatctagaagcagccctgtgaccccaaccgctatactacacccttcttcacctccactgctaagttcataatcctttaatctatcatccccacgtgttgaaggcagctcccttcataattcttacattcaattccaaaattctgaaact

SEQ ID NO: 796 - DNA, 142 bp, Homo sapiens
  misc_feature 1: n = A,T,C or G
ngattggagctccccgcggtggcggccgaacgcgcggccctggagttgcgtcgcgatgaagccgtacgcgcgctgcaggacgaagacaagcgctaccagatcgtcaaggacatcgccgatgacctcaaggtcggctacaaca

SEQ ID NO: 797 - DNA, 457 bp, Homo sapiens
  misc_feature 295, 327, 332, 335, 343, 443, 446: n = A,T,C or G
ctgattggagctccccgcggtggcggccgaggtacttctagaatccacagctctgggagggctaccttaaattaacactggcagttctttgcaattagggtgccataaaagcagcacagttgactccaaaatggactgagttttggaaagatgtctgccagcaaaatcatatagactttcttgctgaagggatgaaaaattaataatgccttgaagtatattaatataaaaatatgtgaccaagcagtgtaattaattcccctttttcctcaaaatgtagccttttttttttganatggagtttcactctgtcacccacgctggagngcagnggngcgatctnagctcactgcaacctcaacctcctgggttcaagcaattctcctgcctcagcctcccaagtagctgggactacaggtgtgtgccccattcccagctaattngtnggatttttttt

SEQ ID NO: 798 - DNA, 421 bp, Homo sapiens
agcgcatgtagtcgtagcggtcggccgccaggctgccgctctgctccttgttgcgcacgatgaccgggcgcaggaagatcatcaggttggttttcttgcgctcgcgcgtctggtacttgaacaggttgccgatcaggggaatgtcgcccaggccgcgcactttctccgcgttgtcgcccgtggtgtcctcgatcaggccacccaacacgatgatctgaccatcgtcggccagcacattgttttcgatcacgcggttgttgatggtgatgccgctgacggccgacgcggtggatttgtccacgctcgacgtctcgtgatagatacccagcttgatcgtgccgccctcggaaatctgcgggcgcaccttcagggtcaggcccacttccttgcggtcgatggtctggaacgggttcgtattggt

SEQ ID NO: 799 - DNA, 416 bp, Homo sapiens
cgaggtacgcgggtcttctctcctccttatgccttttcttcttcctcctcaccctcatggctccaggtccatgcccagggagcatgttagcatgttgtcaggtctcaaagtatctgaaaagattgtcttctctgtggccaggctgcttagaggcagcctgatataaactgtaaaaagggggagagtgtttctctgtgtcctctgcatccactcttcatgcatttgctccaaaccaaatctgctcttaggaagggatcagacgaacctgtttagagtgaggtagcaatgataggttagcagtgggtaaaccacataaatgaaactttaaatgaggaattccaccttgttaaagaagtaaggtgggccaggcacagtggctcacgcctgtaattccagcactttggggggccaaggca

SEQ ID NO: 800 - DNA, 227 bp, Homo sapiens
  misc_feature 9, 11, 140, 185, 192: n = A,T,C or G
tgatccctnangctccagccttcgggaagatatgtctacaatgacctttggccactgacaaagaggaagttatctggaagtttgcaaacctctgttcaactctctatccaccccttggaaggaccttttcagaggaaganaacagagtttgtttttcaaatcattttcaccatatctaaaactanccactcngcttggtgataggacatccctatgaaacacacatg

SEQ ID NO: 801 - DNA, 441 bp, Homo sapiens
  misc_feature 352: n = A,T,C or G
cgtgagcctcgcggatgtggccagggagccgtacattttcctcaccgtcgacgaggccgaacaaagcgccatgcgctactgggaacaggccgggcaaacgcccaaggtgcggctgcgcaccagttcggtggaggcggtgcgcagcatggtcgccaatggcagcggcgtggcaattctgtcggacctggtgcatcgcccgtggtcgctggaaggcaagcgcatcgaaaccgtgagcgtcaccgacaaggtcacgcccatgagtgtcggcctggcctggcaccgcgagcgcgacttcaccccggcgatgcaggcgtttcgtgattacttccacgatgcattcctggcgccgcancagttgtcggcccggcgttaaagccgggattgcaggatcgccgccagccaatccatgaacacccgcacccgctgcggcaaatgccgttg

SEQ ID NO: 802 - DNA, 369 bp, Homo sapiens
ttggagctccaccgcggtggccgagcggccgcccgggcaggtactgggatgagaagctcaagtccctgtcctcaaaaatttactttctagcattgatgaataatcagtcttcactatttatgattaaaaaaactttgttcatcatatgctttatttaaagattgataatctgttctcccattacctggccacttgctctttgctctcctaattacttcttaggacctttagtagctttcttgttttctgagtatggacgttttccctcaagtaagacactactagtcgctgggtgcggtggctcacgcctgtaatcccagcactttgggaggccaaggcgggtggatcacttgaggtcaggagtttgag

SEQ ID NO: 803 - DNA, 209 bp, Homo sapiens
actaccaggatggccgcacgggcaacgccaagctgggcgacatggtggcgctgggcggcggcaagttcctcgtcatcgagcagggcgccgcgccgtcgggcaaggtcttcaacaagctgatgctggtcgaactgaagggcgccacggacattgcggctgccgctttcaatgcgacgacgtccgacctggaaaaaagcagcatgggcggc

SEQ ID NO: 804 - DNA, 355 bp, Homo sapiens
ccgggcaggtactgggatgagaagctcaagtccctgtcctcaaaaatttactttctagcattgatgaataatcagtcttcactatttatgattaaaaaaactttgttcatcatatgctttatttaaagattgataatctgttctcccattacctggccacttgctctttgctctcctaattacttcttaggacctttagtagctttcttgttttctgagtatggacgttttccctcaagtaagacactactagtcgctgggtgcggtggctcacgcctgtaatcccagcactttgggaggccaaggcgggtggatcacttgaggtcaggagtttgagaccagcctggccaacacg

SEQ ID NO: 805 - DNA, 466 bp, Homo sapiens
aggtacaatgtgggactttggtggaactgcctgggagaacttcataattactaccctgtatgtcatgccccttgcaggtaaaacagaagtggcagagcagaggtcaaaggcacagatcagcaaagggaatcctactggatcctgagactagcctggaaggggtgtcatttgtcactgggaatagaggtgcacggcctggtggaccctccgagagagcttaagattcatttttaaaacagaggatttaaaagacacaataggcattggaatcgggtagtaagaagagaaaaccagagccccaagtgaggaagtgggtgatctgtcctcacacagttggtgggggagctgggcctccccactgactggactctcaggtccttaggaggtgctctgtcctgcacaccccaaatgaccacctaaattcaggcctgaagcagtaagaagtacctgcccgggcggccgctcg

SEQ ID NO: 806 - DNA, 457 bp, Homo sapiens
gggcgaattggagctccccgcggtggcggccgaggtactcattggaggatcagctcacctgctttgctctcgatgtagcctagctgggtttagagccttcccttgaatgaagaaccctccccagctggaaggggatgctcttgaaagctcagctgacaacacacatgggcatcaagtcattggccacattcatgcctcaagtgtcctaaaaccgaatatgatcaaaagaaaactgctgttcagcaagtggagactggcatgcagattccctggcctgcaagcctagtgtaaaaagataccaaatactgctggaagaatgaaaaggatgaagggatgtcatcaaagtagttttttcacttgatggaaaagactaaaacagcaaagcaagttcaagatcaaacacaacaccacagggatcctttgatgagaagtgaacttaagaccatgaaatgctgtt

SEQ ID NO: 807 - DNA, 314 bp, Homo sapiens
  misc_feature 8, 9, 11, 12, 17, 18, 19, 20, 23, 24, 30, 34, 35, 37, 40,44, 45, 48, 56, 61, 69, 82, 87, 89, 91, 95, 99, 109, 112,122, 127, 133, 146: n = A,T,C or G
atgtacanntnntgaannnnccnncctgcnaganntnaanatannacntataaatnccttngacctccngggggggcccatntcccncntnctgnaccnattcactganggnaaattgcccnctcgngtaatnatggtcatatctnttgccgaccttctcacaccacatcttccaggattacacttttatgctacacctgcactgatcagtcttctactccagtcttcattttgtcttcgtaaaaatgttgaggatgaatgctgttccactttcctttcctatagcgagatggcctgtcccgcgtacctgcccg

SEQ ID NO: 808 - DNA, 246 bp, Homo sapiens
  misc_feature 1: n = A,T,C or G
nattggagctccccgcggtggcggccgaggtaccttatttacacccatgtgcagggcaaggcaagctagatatttgctgttgttattggggggcaagctcaagttcagaaatgggaagaaagatgcaaggggaagggccatgtatctattgtgcagggaggaatggctgccaattttccaggcatggtctcccatttcccacccaaaggaggaagccaacctattcagaagccaggtacctgcccg

SEQ ID NO: 809 - DNA, 156 bp, Homo sapiens
  misc_feature 2, 3, 6, 7, 8, 9, 20, 21, 25, 29, 33, 34, 38, 44, 47, 50,51, 53, 54, 55, 58, 64, 65, 68, 70, 71, 73, 75, 76, 77,78, 79, 80, 86, 95, 97, 99, 101, 105, 108, 109, 111, 128,131, 139, 140, 145, 149, 153: n = A,T,C or G
tnnttnnnngtgaaaacccnnagtntcantgannatgntttctngcngannannnccntctatnnctncnngngnnnnnnctcctnggtaacgcncnantncacnagnntntatctcctactggctgnaanactctccnnactcncccncctncct

SEQ ID NO: 810 - DNA, 537 bp, Homo sapiens
  misc_feature 453, 457, 471, 514: n = A,T,C or G
acagtgtggcctaaaacagaagaatgtttaactgcatgaaggcagggtggtttgtattgctgggcttggtgtatatttctttgctatctagtttaatatattgagctttacatctgtgccagccttgcatgtccatatacctttggcaggcatttctagtcaggtggcatggggcaaggggtgtgctacgttttaagtccctcatttctccagcctgtccaggtagtgtctacgtctccaactcactcaggaaggcaggagacttccagattcactccactggtatcaagagttaggttctggtgagagagctggcagaagcttcagaggaccttgcgtcttaacctcctcttttttttcctgtccttaacagcaagttgttgcctctaattttcaaaaaatcgcaacacatttccaggagacctgaaatgcggtggactgcttcaacattanattntttttggcagacanggatagtatttagtgtaacgtcacctatatgcttatcaaatangggtaaggggagtcataattatt

SEQ ID NO: 811 - DNA, 482 bp, Homo sapiens
ggagctccacccgcggtggcggccgccgggcaggtacgcgggatgtccctgaagtcctccaggcccacacctccacccgccttctgtcctgtatctgcggaaatatttattttctgtaatgaactttcttggggctccagacaccctctcagcctcttcccacacagaactttgcctacacattcctactacccctggaattctaactcagatgtgggtagcagcttcctcaaagagaaacttttcccagctgggtgctgtggctcacacctgtaatcccagccctttgggaggctggagtgggcagatcgcttgagcccaggagtttgagatcagcctgggcaacatggtgaaactccatctctgtgaaaaatacaaaaattagccaggtgtggtggtgcgcgcctgtaatcccagctactagggaggctgaggtgggaggattgcttgagcccaggaggttgaggctgcaatgggctgcg

SEQ ID NO: 812 - DNA, 340 bp, Homo sapiens
ggagctccccgcggtggcggccgaggtacgcggggacaggccatctcgctataggaaaggaaagtggaacagcattcatcctcaacatttttacgaagacaaaatgaagactggagtagaagactgatcagtgcaggtgtagcataaaagtgtaatcctggaagatgtggtgtgagaaggtagcacaagtgaagcagagatacaggagatagggaagggaagctggaagcagaggtcactggagggagagggagatggacacattcagggctacaaagcaagttctatgtgatttgctcacctctcaattgtgggacccctcaaaatgtgtacctgcccg

SEQ ID NO: 813 - DNA, 226 bp, Homo sapiens
  misc_feature 16, 54, 73, 155, 194: n = A,T,C or G
aaaatggccaaataangagggaaaggtaatagctttgctgtcgtgactaccacnatgaaaggatctggctcangccctcaaggagggcattcttccttgcgtagttattgagaatatggctttctagttaaagtctggctctgccccttaagtcngcagggtgaacacaccaggcaaaagaggtgtgtgtgaangcccacaagtaaggggagacacaccctttccc

SEQ ID NO: 814 - DNA, 294 bp, Homo sapiens
  misc_feature 189, 191, 192, 213, 227: n = A,T,C or G
gggcgaagccgccatggtcgaccacctgcacaaagtaatacaaatcgttcagatcctgcatgccgcctccttgatcgttctatttttggaacgctgatggcgaattttaccgtctaccgcctctatcgttgcaagagtattctgactccatcgtaatgcacaccctacaggagatcgagatgaacacantnncaggtatctacagcgcacccngccagcactgggtnggcgacggtttccccgtgcgctcgatgttttcgtacaccggccatggcaagcagctgagccccttcc

SEQ ID NO: 815 - DNA, 405 bp, Homo sapiens
  misc_feature 212, 215, 217, 219, 226, 247, 316, 321, 350, 374: n = A,T,C or G
gctccccgcggtggcggccgcccgggcaggtacacatacataaaagaaaatggccaaataaaaagggaaaggtaatagctttgctgtcgtgactaccacgatgaaaggatctggctcaagccctcaaggagggcattcttccttgcgtagttattgagaatatggctttctagttaaagtctggctctgccccttaagtcggcagggtgaanacncnangcaaaangaagtgtgtgtgaaagcccanaaataaagggggagacacaccctttcaccctttcaagcaaggccttgatccttgctcccccacaaaagnttgtnacctggttctgtcctctaaaacattccangaaggtaaaggctgcaagaagaancctggttctttgagcttccaaaaaaaaaagt

SEQ ID NO: 816 - DNA, 496 bp, Homo sapiens
  misc_feature 10, 118, 246, 264: n = A,T,C or G
ttggagctcnccgcggtggcggccgaaataccgatattgacttccgtaatggtcgcggccgccggcgtgtagtgcaattccagcggcaaggtgtgggtggccgtggccatgccttgcnacacggatacatacggccccaagcagattgcccgtcaacttgatcggctgcatcacgggacgggcggccttgttcggcgagctgaacttcgcctgcgtcaccttcaaacccttgcacacgagactcanttccaccgtcgtcacggnggccagggcgctgtcgccgatattcgtggcgctgacattgccgcccaggctcaacgccccatccttggtttgcttgctgacatcgacgcattccgtcctgacgatgctgccctgcgtgtaatgcgtctggttgacggcgcccgtggcggccaggttgacgccgggcagccccgtcacggcgtacgaccaggtatcgttgtactggctttgcgccgtcgtgtaaacggggtat

SEQ ID NO: 817 - DNA, 469 bp, Homo sapiens
  misc_feature 8, 14, 27, 73, 80, 89, 96, 101, 103, 114, 299, 358: n = A,T,C or G
tgggcttnttcgtngaccgtttgcgcncgggcctgaaccgcgacgcgcaccagctgctgggggccgacctggncatcagngccgaccancccgtcnatgcngngtggcgcgccnaagcgcacaagcgcggttttatcctggccgacacggtgacgtttcccagcatggcgcaggcgggcgagggcgagcagtcgctgtcgcagctggcgtccctcaaggccgtctcgcccggctacccgcagcggggcaagctgaaaatcacgaccaaactgaacgaagcgcaggatgccgtgggccanccgaccagccaggtaccggcgcccggcaccttgtgggtcgacgcggcgattttgtccancctgaacgcgaaactgggcgacaccttgaccttgggcgacaaggcatttaccgtcacgcaacttgatcccagtgagccggaccggggccgcctcgttcctgaacttccccc

SEQ ID NO: 818 - DNA, 452 bp, Homo sapiens
  misc_feature 17: n = A,T,C or G
ccgcggtggcggccgangtaccaacatgctttaccatgctgcaaaatttaggatcctgtggctgaaatattttgtaagaaatgatgcatcctgaatttatcattgaatttcaagtcttgaaataagtaaattcacatttccttgttttggcatagaagtgtttagctgattaaagtttttggcacttgttttgcatttcctctgagagggcactaatgtatgagagaaggtaaaccgaaccttctaagggaaaggaaagttaaggaggcaggaaaagcatctatagctctgttttcgggatttaagagtataggttctggaggcagactgctcagcagactggagccaggtcccaagtctggctttgcctgtcactagctgtgtgagctctgccttagtgagtctcagctttctcatctgtcaaatggaggtgacgagggctgtggtgagga

SEQ ID NO: 819 - DNA, 388 bp, Homo sapiens
  misc_feature 220, 233, 271, 321, 343: n = A,T,C or G
tgcttgctatcgcgcaacgtcttgtcatgctcggaagccacatgcaacagcccgccctgcaaggccgcttccatggcgtcgagcaccttgaaaaactgctccgtcgcttctttcgagacgggcgcgagctcctggcgcggcttgcgcagtacaggtgcaggtccaggctcggcatgggccgccgcggcctctggcgctgccgcctgcacgggtgccggcncgctggccaacanggccgaaaattgctgctgcaagctgtcggacaaactgnattcaggcaggcgcggcatggcttgccacgcgcgtttcatggcattcacnttgaggctggcggcgtcctgcncctgccattccgccagtgcggtctggcgcgcgtcgaacactgact

SEQ ID NO: 820 - DNA, 416 bp, Homo sapiens
gtgtccggatgcttctacagcacagcggagctcgatcgaaagagggcagtcgggatcgtccagcctaaccataaccgactggtcggtggcacggttcagctgaagctccgctggcagatcagcatcttgctgctggccttggccgatacggcgttgcatacctttctgttggtacacctgcaggacgtggtcgagcagctggtggccatcgctatcggccgggaagagctccatgaagctcgtagcgtcgacttcgaaccgagggttgtccttgttctgttcctgcagtctgcgctcgtagtgggcctgcaggcggtccagttcgcgcactgcccacgcgcaggcggaggaaaggctagttttggggccagtcacaccgcctccggtattcggcaagtaggtgccaggcgactggt

SEQ ID NO: 821 - DNA, 300 bp, Homo sapiens
  misc_feature 269, 277: n = A,T,C or G
cgaggtacttcctggcttgttgagcgtgtcctcactgctggccctcttgagcctgctgagtcgggactcaaaagccaaggaagttgaagacttagaactcttcatgccggaagaggctgcaggcagaggccgcacccggtctgggccgtggccccctgctctgatggatgggttccagggcttggctgcactccgcatgcttgacttcgtgggtctgtctgcaaaaactctgcttctcctgcttctcgggagctgccgacctcaatcancaagtcanccactctcccgcgtacctgcccg

SEQ ID NO: 822 - DNA, 339 bp, Homo sapiens
  misc_feature 154, 167, 170, 176, 207: n = A,T,C or G
gagctccccgcggtggcggccgcccgggcaggtacgcggggacctgctgtgctcttgcttgcacagtgtcctggagctggacctggctctgggtttccaggaagcagtttgactaaaggcagcaagctgcttcctctgctgcctgagataccanattcccaatggcnaanattganaaaaacgctcccacgatggaaaaaaagccanaactgtttaacatcatggaagtagatggagtccctacgttgatattatcaaaagaatggtgggaaaaagtatgtaatttccaagccaagcctgatgatcttattctggcaacttacccaaagtcaggtacct

SEQ ID NO: 823 - DNA, 351 bp, Homo sapiens
  misc_feature 5, 34, 42, 46, 57, 58, 59, 65, 76, 79, 98, 106, 110, 111,113, 114, 124, 131, 133, 137, 140, 141, 143, 146, 149, 152,154, 155, 157, 167, 168, 169, 173: n = A,T,C or G
gggcnaattggagctccccgcggtggcggccgangtacacgnggtntaacctgctgnnntcttgnttgcacagtgnccnggatctggacctggctctnggttgggngganncnntccgactaanggcaccntnctgnttnntntgntgnctnanntnccatattccnnntggnaaatattgacaaaaacgctcccacgatggaaaaaaagccagaactgtttaacatcatggaagtagatggagtccctacgttgatattatcaaaagaatggtgggaaaaagtctgtaatttccaagccaagcctgatgatcttattctggcaacttacccaaagtcaggtacctgcccg

SEQ ID NO: 824 - DNA, 320 bp, Homo sapiens
aggtacgcggggacctcacctgctgtgctcttgcttgcacagtgtcctggagctggacctggctctgggtttccaggaagcagtttgactaaaggcagcaagctgcttcctctgctgcctgaaataccagattcccaatggcgaagattgagaaaaacgctcccacgatggaaaaaaagccagaactgtttaacatcatggaagtagatggagtccctacgttgatattatcaaaagaatggtgggaaaaagtctgtaatttccaagccaagcctgatgatcttattctggcaacttacccaaagtcaggtacctgcccg

SEQ ID NO: 825 - DNA, 317 bp, Homo sapiens
aggtacctgactttgggtaagttgccagaataagatcatcaggcttggcttggaaattacatactttttcccaccattcttttgataatatcaacgtagggactccatctacttccatgatgttaaacagttctggctttttttccatcgtgggagcgtttttctcaatcttcgccattgggaatctggtatctcaggcagcagaggaagcagcttgctgcctttagtcaaactgcttcctggaaacccagagccaggtccagctccaggacactgtgcaagcaagagcacagcaggtgaccccgcgtacctgcccg

SEQ ID NO: 826 - DNA, 438 bp, Homo sapiens
cccttagcgtggtcgcggccgaggtaccgcagtatggttggccatgggattatccttcattacatcaaatgaggtatggtggacaatcttgtttataacatcacctgacaaagttttctccaagaattccaacaccttgtggatctcatgttttggattttttttaatatccccgtagaagaggtagaggatccggtgcgtgtcttttgcagcccaccatcctttcacatggtcaaaccaggacctgccaacaacttttccggacatgaatttctcataaaattcctctaagttctgaggatcaggcataaaggaagccatcctgtgaaagtggtagtaggacaccaggcaatccttgggatttctggccacatagacaatcttgcagttttctttccagatagatggtggaatcagatgtgaagggagatgtgtttt

SEQ ID NO: 827 - DNA, 410 bp, Homo sapiens
ggtaccgcagtatggttggccatgggattatccttcattacatcaaatgaggtatggtggacaatcttgtttataacatcacctgaccaagttttctccaagaattccaacaccttgtggatctcatgttttggattttttttaatatcctcgtagaagaggtagaggatccggtgcatgtcttttgcagcccaccatcctttcacatggtcaaaccaggacccgccaacaacttttccggacatgaatttctcataaaattcctctaagttctgaggatcaggcataaaggaagccatcctgtgaaagtggtagtaggacaccaggcaatccttgggatttctggccacatagacaatcttgcagttttctttccagatagatggtggaatcagatgtgaagggagatg

SEQ ID NO: 828 - DNA, 395 bp, Homo sapiens
cccttagcgtggtcgcggccgaggtaccgcagtatggttggccatgggattatccttcattacatcaaatgaggtatggtggacaatcttgtttataacatcacctgaccaagttttctccaagaattccaacaccttgtggatctcatgttttggattttttttaatatcctcgtagaagaggtagaggatccggtgcatgtcttttgcagcccaccatcctttcacatggtcaaaccaggacccgccaacaacttttccggacatgaatttctcataaaattcctctaagttctgaggatcaggcataaaggaagccatcctgtgaaagtggtagtaggacaccaggcaatccttgggatttctggccacatagacaatcttgcagttttctt

SEQ ID NO: 829 - DNA, 315 bp, Homo sapiens
cggccgcccgggcaggtaccgcagtatggttggccatgggattatccttcattacatcaaatgaggtatggtggacaatcttgtttataacatcacctgaccaagttttctccaagaattccaacaccttgtggatctcatgttttggattttttttaatatcctcgtagaagaggtagaggatccggtgcatgtcttttgcagcccaccatcctttcacatggtcaaaccaggacccgccaacaacttttccggacatgaatttctcataaaattcctctaagttctgaggatcaggcataaaggaagccatcc

SEQ ID NO: 830 - DNA, 376 bp, Homo sapiens
cgcccgggcaggtaccgcagtatggttggccatgggattatccttcattacatcaaatgaggtatggtggacaatcttgtttataacatcacctgaccaagttttctccaagaattccaacaccttgtggatctcatgttttggattttttttaatatcctcgtagaagaggtagaggatccggtgcatgtcttttgcagcccaccatcctttcacatggtcaaaccaggacccgccaacaacttttccggacatgaatctctcataaaattcctctaagttctgaggatcaggcataaaggaagccatcctgtgaaagtggtagtaggacaccaggcaatccttgggatttctggccacatagacaatcttgcag

SEQ ID NO: 831 - DNA, 379 bp, Homo sapiens
  misc_feature 1, 2: n = A,T,C or G
nnattggagctccaccgcggtggccgagcggccgcccgggcaggtacgcgggtagacacgctttccttgaactgaaattttccccataaagaaaaaccagatttggagttcgttcttgaaatgtcctcaccacaactgataaaaacacatctcccttcacatctgattccaccatctatctggaaagaaaactgcaagatcgtctatgtggccagaaatcccaaggattgcctggtgtcctactaccactttcacaggatggcttcctttatgcctgatcctcagaacttagaggaattttatgagaaattcatgtccggaaaagttgttggcgggtcctggtttgaccatgtgaaaggatggtgggctgcaaaagaca

SEQ ID NO: 832 - DNA, 260 bp, Homo sapiens
tgattggagctccccgcggtggccgagcggccgcccgggcaggtacaacatggatgcatgaaattttagacatgattctaaatgatggtgatgtggagaaatgcaaaagagcccagactctagatagacacgctttccttgaactgaaatttccccataaagaaaaaccagatttggagttcgttcttgaaatgtcctcaccacaactgataaaaacacatctcccttcacatctgattccaccatctatctggaaagaa

SEQ ID NO: 833 - DNA, 612 bp, Homo sapiens
  misc_feature 505, 598, 606: n = A,T,C or G
accgcagtatggttggccatgggattatccttcattacatcaaatgaggtatggtggacaatcttgtttataacatcacctgaccaagttttctccaagaattccaacaccttgtggatctcatgttttggatttttttaatatcctcgtagaagaggtagaggatccggtgcatgtcttttgcagcccaccatcctttcacatggtcaaaccaggacccgccaacaacttttccggacatgaatttctcataaaattcctctaagttctgaggatcaggcataaaggaagccatcctgtgaaagtggtagtaggacaccaggcaatccttgggatttctggccacatagacaatcttgcagttttctttccagatagatggtggaatcagatgtgaagggagatgtgtttttatcagttgtggtgaggacatttcaagaacgaactccaaatctggtttttctttatggggaaatttcagttcaaggaaaacgtgtctatctanaagtctgggctcttttgcatttctccacatcaccatcatttagaatcatgtctaaaatttcatgcatccatgttgtacctcggcccgctctanaaactagngggatc

SEQ ID NO: 834 - DNA, 501 bp, Homo sapiens
  misc_feature 26, 29, 32, 58, 65, 109: n = A,T,C or G
aggtacaacatggatgcatgaaattntanacntgattctaaatgatggtgatgtgganaaatgcnaaagagcccagactctagatagacacgctttccttgaactgaantttccccataacagaaaaaccagatttggagttcgttcttgaaatgtcctcaccacaactgataaaaacacatctcccttcacatctgattccaccatctatctggaaagaaaactgcaagattgtctatgtggccagaaatcccaaggattgcctggtgtcctactaccactttcacaggatggcttcctttatgcctgatcctcagaacttagaggaattttatgagaaattcatgtccggaaaagttgttggcgggtcctggtttgaccatgtgaagggatggtggggctgcaaaaagacatgcaccggatcctcttacctcttctacgagggatattaaaaaaaatcccaaaaaccatgagatccccaaaggtggttggaattcttgg

SEQ ID NO: 835 - DNA, 637 bp, Homo sapiens
  misc_feature 163, 635: n = A,T,C or G
ccgggcaggtaccgcagtatggttggccatgggattatccttcattacatcaaatgaggtatggtggacaatcttgtttataacatcacctgaccaagttttctccaagaattccaacaccttgtggatctcatgttttggattttttttaatatcctcgtanaagaggtagaggatccggtgcatgtcttttgcagcccaccatcctttcacatggtcaaaccaggacccgccaacaacttttccggacatgaatttctcataaaattcctctaagttctgaggatctggcataaaggaagccatcctgtgaaagtggtagtaggacaccaggcaatccttgggatttctggccacatagacaatcttgcagttttctttccagatagatggtggaatcagatgtgaagggagatgtgtttttatcagttgtggtgaggacatttcaagaacgaactccaaatctggtttttctttatggggaaatttcagttcaaggaaagcgtgtctatctagagtctgggctcttttgcatttctcccatcaccatcatttaaaatcatgtctaaaatttcatgcatccatgttgtacctcgccgtctagaactagtggatccccgggctgcaggaattcnat

SEQ ID NO: 836 - DNA, 542 bp, Homo sapiens
  misc_feature 493: n = A,T,C or G
aggtacaacatggatgcatgaaattttagacatgattctaaatgatggtgatgtggagaaatgcaaaagagcccagactctagatagacacgctttccttgaactgaaatttccccataaagaaaaaccagatttggagttcgttcttgaaatgtcctcaccacaactgataaaaacacatctcccttcacatctgattccaccatctatctggaaagaaaactgcaagattgtctatgtggccagaaatcccaaggattgcctggtgtcctactaccactttcacaggatggcttcctttatgcctgatcctcagaacttagaggaattttatgagaaattcatgtccggaaaagttgttggcgggtcctggtttgaccatgtgaaaggatggtgggctgcaaaagacatgcaccggatcctctacctcttctacgaggatattaaaaaaaatccaaaacatgagatccacaaggtgttggaattcttgganaaaacttggtcaggtgatgttataaacaaagattgtccaccatacctca

SEQ ID NO: 837 - DNA, 416 bp, Homo sapiens
gattggagctccccgcggtggcggccgcccgggcaggtacaacatggatgcatgaaattttagacatgattctaaatgatggtgatgtggagaaatgcaaaagagcccagactctagatagacacgctttccttgaactgaaatttccccataaagaaaaaccagatttggagttcgttcttgaaatgtcctcaccacaactgataaaaacacatctcccttcacatctgattccaccatctatctggaaagaaaactgcaagattgtctatgtggccagaaatcccaaggattgcctggtgtcctactaccactttcacaggatggcttcctttatgcctgatcctcagaacttagaggaattttatgagaaattcatgtccggaaaagttgttggcgggtcctggtttgaccat

SEQ ID NO: 838 - DNA, 423 bp, Homo sapiens
  misc_feature 302: n = A,T,C or G
cgggcaggtacaacatggatgcatgaaattttagacatgattctaaatgatggtgatgtggagaaatgcaaaagagcccagactctagatagacacgctttccttgaactgaaatttccccataaagaaaaaccagatttggagttcgttcttgaaatgtcctcaccacaactgataaaaacacatctcccttcacatctgattccaccatctatctggaaagaaaactgcaagattgtctatgtggccagaaatcccaaggattgcctggtgtcctactaccactttcacaggatggcttnctttatgcctgatcctcagaacttagaggaattttatgagaaattcatgtccggaaaagttgttggcgggtcctggtttgaccatgtgaaaggatggtgggctgcaaaagacatgcaccgg

SEQ ID NO: 839 - DNA, 238 bp, Homo sapiens
  misc_feature 8, 24, 33, 75, 90, 98, 111, 127, 142, 185, 189, 203, 213,215: n = A,T,C or G
ccctttcnagcggccgcccgggcnggtactganctccacaaacgtggccatggttggtgcggaaatgattctgantgagcaggtaaaagnctcacgtnctgctgtgtccanagttggttccttccanagggttcgtggtctngctggcttcaagaatgaagccgtggaccttcacagtgtgtgtnacanctgttaaagatgtngtgtctggantnacgttccttcacatgtgtctgga

SEQ ID NO: 840 - DNA, 352 bp, Homo sapiens
acgcggggaggagagatcaaacagaactgctgctgggtggttgtcaggagctgctacacggagaaccctggactattcgatcaagcagcaaggctatatgttcacttatgcagaaatggaccattgcagatgctaatctttgttgtgcaagcgaaggctcacttggaaggaaatactcagcccctctctgggcagcatttgagttccttatggataccgagtcgcgaaacaagttattttttttaatgtatccttctttatgaggagaatgctacccaaaaatgtattaaaggaatattaagtcgtccagagactgtcttgctaccaagaactgtgcaatggaattcttttt

SEQ ID NO: 841 - DNA, 307 bp, Homo sapiens
acctcagttggaaatgcagaaatcacccatcttctacatcgatcttgctgggagctgcagaccagagctgttcctatttggctatcttggaagcaacctcaggtatttctttattagcagtgtgagaacagactaatacagattactaaatccagaatccagagaacacaagattataagttccttgcgcttgagcatgttcagtgagagcgctgcagggagaaggatgatgcattctgagagccaacagggctggactggaaactggaggaagagaaagagctaaggaaggagaggagcaaattgg

SEQ ID NO: 842 - DNA, 309 bp, Homo sapiens
  misc_feature 35, 41, 44, 51, 54, 57, 61, 63, 66, 70, 72, 78, 110, 117,126, 128, 136, 143, 145, 151, 154, 158, 166, 168, 170, 172,181, 189, 194, 197: n = A,T,C or G
cccttagcgtggtcgcggccgaggtacctgacttngggtangtngccatantangancatnangcntggntnggaaantacatactttttcccaccattcttttgataanatcaacntatggactncntctacttncatgatntnaaacantantggntttttttncntngngggagcgtntttctcantcttnacnattgggaatcagatgggcttttggcttatctctccctgtgtgagccattaaaggggataataaggatcattgcttatattctctgtgaatttataattaatgaaaaaggatt

SEQ ID NO: 843 - DNA, 267 bp, Homo sapiens
  misc_feature 37, 63, 115, 117, 127, 137, 144, 146, 161, 166, 171, 172,174, 176, 178, 179, 180, 181, 184, 197, 207, 208, 210, 214,216, 220, 221, 224, 228, 242, 247: n = A,T,C or G
cccttagcgtggtcgcggccgaggtacgcgggctttnaagaagtccttgttggaattttcctnagctagatttcaagccatgtcaggacaccactctcattatattaccataatngntttttctttntttttttttnaaatttnanttttttaaaattccnggatncatgnncngnannnnccntattttttttaangtcaaatccnncnttantntccnngtngatnacaaatataacccngaggnaatttttttttttttttttt

SEQ ID NO: 844 - DNA, 340 bp, Homo sapiens
aggtactgtgggttctgagtcaaggatcccagtgctgccaggaaccagcagtcagctgcgcctccttgttggatgtcaaatctgcttatatcatccaggatgaagtgaggaggaccccctggtagatcctgtggccgcttccatatcacattggagaggcgtttttcctggagcagcttctggcctatggaagaatctgctgcagggaatgtctcatccttaaacgtccggcccatgctcaggcagtgatcccgcaaggtggtaaagtcctggtctttgaacttgatgatggaggtctccactgaaggctcctggtaatacgccatgactctccttagaa

SEQ ID NO: 845 - DNA, 390 bp, Homo sapiens
  misc_feature 2: n = A,T,C or G
tnagggcgaattggagctccccgcggtggcggccgcccgggcaggtactgatcatagttgatcacaattggagggggaagggctgtggcttctcaaatcaaaggaggctggtgggttaaaatcatcaacagcatttcatggtcttaagttcacttctcatcaaaggatccctgtggtgttgtgtttgatcttgaacttgctttgctgttttagtcttttccatcaagtgaaaaaactactttgatgacatcctttcatccttttcattcttccagcagtatttggtatctttttacactaggcttgcaggccagggaatctgcatgccagtctccacttgctgaacagcagttttcttttgatcatattcggttttaggacacttgaggc

SEQ ID NO: 846 - DNA, 346 bp, Homo sapiens
aggtactgtgggttctgagtcaaggatcccagtgctgccaggaaccagcagtcagctgcgcctccttgttggatgtcaaatctgcttatatcatccaggatgaagtgaggaggaccccctggtagatcctgtggccgcttccatatcacattggagaggcgtttttcctggagcagcttctggcctatggaagaatctgctgcagggaatgtctcatccttaaacgtccggcccatgctcaggcagtgatcccgcaaggtggtaaagtcctggtctttgaacttgatgatggaggtctccactgaaggctcctggtaatacgccatgactctccttagaagacttc

SEQ ID NO: 847 - DNA, 350 bp, Homo sapiens
ccgggcaggtacgcggggaaagtgtgtagcacctccaccttctctctctctctccctctccctctcctgccagccaagtgaagacatgcttacttccccttcaccttccttcatgatgttaccattggaatgacatactgcatcctatagttataccatccactctgaaatcaatgtgaatttaacttcagttccatacagaaacttcttttccacaggtaagaaacggttgaactggatgcaatttttatcacagcttgtgtaagactgcctctgtccctcctctcacatgccattggttaaccagcagacagtgtgctcgggggcgttgccagctcattgctcttata

SEQ ID NO: 848 - DNA, 352 bp, Homo sapiens
aggtactgtgggttctgagtcaaggatcccagtgctgccaggaaccagcagtcagctgcgcctccttgttggatgtcaaatctgcttatatcatccaggatgaagtgaggaggaccccctggtagatcctgtggccgcttccatatcacattggagaggcgtttttcctggagcagcttctggcctatggaagaatctgctgcagggaatgtctcatccttaaacgtccggcccatgctcaggcagtgatcccgcaaggtggtaaagtcctggtctttgaacttgatgatggaggtctccactgaaggctcctggtaatacgccatgactctccttagaagacttccgaggt

SEQ ID NO: 849 - DNA, 433 bp, Homo sapiens
  misc_feature 396: n = A,T,C or G
attggagctccccgcggtggcggcccgaggtactgtgggttctgagtcaaggatcccagtgctgccaggaaccagcagtcagctgcgcctccttgttggatgtcaaatctgcttatatcatccaggatgaagtgaggaggaccccctggtagatcctgtggccgcttccatatcacattggagaggcgtttttcctggagcagcttctggcctatggaagaatctgctgcagggaatgtctcatccttaaacgtccggcccatgctcaggcagtgatcccgcaaggtggtaaagtcctggtctttgaacttgatgatggaggtctccactgaaggctcctggtaataccccatgactctccttagaagacttccgaggtcctttcctgtttcctangcaggtgtgtctgatggaggaggggagaccggcaggt

SEQ ID NO: 850 - DNA, 254 bp, Homo sapiens
  misc_feature 1, 41, 46, 50, 56, 85, 102, 107, 145, 176, 181, 184: n = A,T,C or G
ntcctttttttttttaatttttaaatcagctttcctagctngaagngttnctagtnttgaatggtgggatgtagtcaaggaggtntttgttcaaggttgganatgancagcttttataataattccaggtttgggatatatcagngaaatttcatttttcattttctactaacagngccanatnggcctcactttttggactggatcaggcagctgctggccatggaaatgaatttttccagtacacagcccca

SEQ ID NO: 851 - DNA, 333 bp, Homo sapiens
acgcggggatgagatctggttgtttgaaagtgtgtagcacctccaccttctctctctccctccctctccctctcctgccagccaagtgaagacatgcttacttccccttcaccttccttcatgatgttaccattggaatgacatactgcatcctatagttataccatccactctgaaatcaatgtgactttaacttcagttccatacagaaacttcttttccacgggtaagaaacggttgaactggatgcaatttttatcacagcttgtgtaagactgcctctgtccctcctctcacatgccattggttaaccagcagacagtgtgctcaggg

SEQ ID NO: 852 - DNA, 376 bp, Homo sapiens
  misc_feature 3: n = A,T,C or G
ctnattggagctccaccgcggtggcctaccggaactgaatctgccttccaagttacacggataagaattatggttcgacgtggtggcatcggtgcccagtgtgggttggtgtttgcctataactcatcttcagataaattttgtgcaggaagaacacttcaaaaggtttgaaaaatatgacaaatggaagcttcaggagctcaggcaatttgtaaaaagcaggtaagaaggtaaaaaatctttgtagaacaaagatctacagaacaaaaatctttgtagttaataagaatgtattcatgctcattggtgaactgtgcttgcttgtctttatagaaaaggcgccactaatccatctcagtggccataagccttcatt

SEQ ID NO: 853 - DNA, 381 bp, Homo sapiens
  misc_feature 10, 14, 16, 17, 19, 21, 29, 33, 37, 39, 40, 47, 54, 56, 57,58, 65, 66, 74, 78, 84, 90, 94, 95, 96, 100, 101, 103, 108,112, 122, 124, 127, 135, 136, 148, 322: n = A,T,C or G
atgtacaccnggtnannancntggcctgnggcngtangnnctcatgntcatctntnnntggaaanncctagggnggcncagggncaacantttnnnacannanctganggtnaaacggcctntngcngacttaannctcatgcctgtnaattggaaatacaaagacctccaaaaaaggaccagttcctcggatgtgccccctcacagagagatgaaggggcagcagaaaacagctgaaacggaagaggggacagtgcagattcaggaaggtgcagtggctactggggaagacccaaccagtgtggctattgccagcatccantcagctgccaccttcctgaccccaacgtcaagtgatgtacctgcccgggcggccgctcg

SEQ ID NO: 854 - DNA, 342 bp, Homo sapiens
agctccccgcggtggcggccgaggtactgtcgttgggttgcacccaaggcacttgggcccacctgccttcccacacactcactatccagaaaagaggaaaagcctaaagatgacacaccttcctccctactcaggcctcctcggcgatggctttgattgtcttgtgttttttataggggccaaagagcagttgattttttttcaaagtctagtatttctctgaagattctacatctctacacaagatattcattcttttggtcacctagggatcttctaagtgtgatattactttcagagaattcagacaagtgagaaacaataatgtaggagtcagcaaag

SEQ ID NO: 855 - DNA, 402 bp, Homo sapiens
ctgattggagctccccgcggtggcggcccgaggtacgcggggagactctgccttttcaacatggatggctcctcccgctgccgctgccgctccaggagacagcattacagagcatcagttaggtgcagagactgggcagtgcgcccgtgtgcaaagacaggagacacgaatcttccctgaaggagtgacagtctagggaggaaggcagactgcaggggacctacttctctcgggaatctcaatacttggaacaagaacctcctagacggaccctttggcataatgaattggaccaactgtaggttccaggactagagagccagcaatgcctccatgaacaatctcacccaattactctgctcaggaaacgaggtaactgatggacagccgaggcagcccctt

SEQ ID NO: 856 - DNA, 357 bp, Homo sapiens
cgaggtactgtgggttctgagtcaaggatcccagtgctgccaggaaccagcagtcagctgcgcctccttgttggatgtcaaatctgcttatatcatccaggatgaagtgaggaggaccccctggtagatcctgtggccgcttccatatcacattggagaggcgtttttcctggagcagcttctggcctatggaagaatctgctgcagggaatgtctcatccttaaacgtccggcccatgctcaggcagtgatcccgcaaggtggtaaagtcctggtctttgaacttgatgatggaggtctccactgaaggctcctggtaatacgccatgactctccttaaaagacttccgaggtcct

SEQ ID NO: 857 - DNA, 426 bp, Homo sapiens
ccgggcaggtacaggacacaatccctgcttcattcttggctgacacagtataccacccagcatcttcttttgtggctccctgaatgagcaggcagatgtagccgtggttgtcctggtgcatgctggagaaaaggataaagtcattagggttctaaattttttaaaagtggctttggacatgaagcatcatttttaattagatcattagaaacagaattgtgcaagtagctgataatagggtcatacttattctgtagagattactagctccattaaagttaatgggagaaagaacagacgtcaagagttgaatacatctgtgtgcttaattcctagttgaggatctgcctttacaaaaaccactgaatagtcttttatcactaaagcaaatgaattcatcttttcttttagatagaatgataaaca

SEQ ID NO: 858 - DNA, 318 bp, Homo sapiens
  misc_feature 3, 5, 6, 9, 13, 23, 36, 51, 56, 61, 67, 72, 80, 81, 87, 103,104, 106, 126: n = A,T,C or G
ttntnncantctnatcagatacntggccgacctccnagggggggcccgggnaccgngactnttgtcncattnagtgaggnncaatcnggaggcttggccgtanntntggaccatatctggttctcntgctccatgagaaaagttttagagacagtctttgatgaagtcatcatggtagatgtcttggacagtggcgattctgctcatctaaccttaatgaagaggccagagttgggtgtcacgctgacaaagctccactgctggtcgcttacacagtattcaaaatgtgtattcatggatgcagatactctggtccta

SEQ ID NO: 859 - DNA, 337 bp, Homo sapiens
acgcggggagactctgccttttcaacatggatggctcctcccgctgccgctgccgctccaggagacagcattacagagcatcagttaggtgcagagactgggcagtgcgcccgtgtgcaaagacaggagacacgaatcttccctgaaggagtgacagtctagggaggaaggcagactgcaggggacctacttctctcgggaatctcaatacttggaacaagaacctcctagacggaccctttggcataatgaattggaccaactgtaggttccaggactagagagccagcaatgcctccatgaacaatctcacccaattactctgctcaggaaacga

SEQ ID NO: 860 - DNA, 384 bp, Homo sapiens
  misc_feature 2: n = A,T,C or G
cnaattggagctccccgcggtggcggccgaggtactgtgggttctgagtcaaggatcccagtgctgccaggaaccagcagtcagctgcgcctccttgttggatgtcaaatctgcttatatcatccaggatgaagtgaggaggaccccctggtagatcctgtggccgcttccatatcacattggagaggcgtttttcctggagcagcttctggcctatggaagaatctgctgcagggaatgtctcatccttaaacgtccggcccatgctcaggcagtgatcccgcaaggtggtaaagtcctggtctttgaacttgatgatggaggtctccactgaaggctcctggtaatacgccatgactctccttagaagacttccgaggtcct

SEQ ID NO: 861 - DNA, 676 bp, Homo sapiens
  misc_feature 1, 3, 4, 7, 9, 20, 40, 41, 45, 48, 54, 57, 64, 65, 67, 69,70, 71, 72, 78, 81, 85, 92, 101, 104, 109, 114, 125, 129,130, 131, 133, 135, 139, 140, 146, 159, 162, 165, 168, 178,179, 180, 187, 190, 194, 197, 198, 201, 202, 203, 210: n = A,T,C or G
  misc_feature 215, 219, 220, 229, 251, 261, 288, 300, 301, 306, 312, 316,317, 318, 320, 326, 329, 330, 331, 332, 333, 335, 337, 344,575, 657, 662, 664, 670, 672: n = A,T,C or G
ncnngcntngtcctatatcnaatatacccattgcgggccnngccnctnggaggnctnttctcanntnannnnatcatncgntganggtggcnttagatccnaantatcnccccnttgactgtgcntatnnntntnagannctgcancaagcgggataanccnttnatnataatatccnnnataaggntgngatnctnnagnnnctgtgcntctgntggnnagtagtganctctttctttaccagacccctngtggacgaangcttttatacaagaccctcctggaccntgcagctatacnntatgnacctgnatcnnntnccctgnccnnnnngntncctgacnggggatgactttttccccaaagatgataaaggtaatatgatcagtggaaaaggaacgttcttggatgcctgggaggccatggaggagctggtggacgaggggctggtgaaagcccttggggtctcaaatttcaaccacttccagatcgagaggctcttgaacaaacctggactggaaatataaaccagtgactaaccaggtttgagtgtcacccatacctcacgccagganaaactgatccagtcctcggcccgtcttaaaactagtggatccccccggcttgcaggaaattcgatttcaaagcttatcgatncccgncnacctcnangggg

SEQ ID NO: 862 - DNA, 465 bp, Homo sapiens
  misc_feature 451: n = A,T,C or G
gccatgctctcctcctctgccagtctcctccaccactctctaacctgagagcctgtggaacctgcccgtctcccctcctccatcagacacacctgcctaggaaacaggaaaggacctcggaagtcttctaaggagagtcatggcgtattaccaggagccttcagtggagacctccatcatcaagttcaaagaccaggactttaccaccttgcgggatcactgcctgagcatgggccggacgtttaaggatgagacattccctgcagcagattcttccataggccagaagctgctccaggaaaaacgcctctccaatgtgatatggaagcggccacaggatctaccagggggtcctcctcacttcatcctggatgatataagcagatttgacatccaacaaggaggcgcagctgactgctggttcctggcagcactgggatccttgactcanaacccacagtacct

SEQ ID NO: 863 - DNA, 519 bp, Homo sapiens
ccgggcaggtacctgaaaaacagctggtaggatggaggaactgagcttttaaataggcaaatgtggctaggagctaccatactggacagcacagtgtattagtttggtgcaaaagtaattgtggttttggccatttttaagtggattggtaagcctggctatttaaagtgtggtccacagagcaggagaatcactgcacctgagagctggtggaaatgtagatctctgacgttagcataggcttcctaaatcagaaactgcattctaacaagatctcctggtgcttctcatgcacagtaaagtttagaaagttaggagatgcatacaagtggttctcatcctgacagcacttcagacacaactgagaaacattaaaagaagctgagcctaggtcacaccctccacccagagattcttaggttaatggtttaaaggcttggcctgaacatgaagagttttaaaagcactctgggggattctaataaaaattcgagaaccatcccagcataagtcagtcct

SEQ ID NO: 864 - DNA, 393 bp, Homo sapiens
  misc_feature 1: n = A,T,C or G
naattggagctccccgcggtggcggccgaggtactgtgggttctgagtcaaggatcccagtgctgccaggaaccagcagtcagctgcgcctccttgttggatgtcaaatctgcttatatcatccaggatgaagtgaggaggaccccctggtagatcctgtggccgcttccatatcacattggagaggcgtttttcctggagcagcttctggcctatggaagaatctgctgcagggaatgtctcatccttaaacgtccggcccatgctcaggcagtgatcccgcaaggtggtaaagtcctggtctttgaacttgatgatggaggtctccactgaaggctcctggtaatacgccatgaccctccttagaagacttccgaggtcctttcctgtttc

SEQ ID NO: 865 - DNA, 465 bp, Homo sapiens
  misc_feature 1, 271, 412: n = A,T,C or G
nattggagctccccgcggtggcggccgcccgggcaggtacctgactgtggctcagatctgcgtcgcagcagcgagagaagaaatcactccatatccgatgagaggaagagtggcacagagatggtgtctacaattagagacatttctgactccaccttagcctaagcaaactttatatactgagtaacatttgaaggttgtcttttaatggtggggggtgtttttttcctttttaaactacagtgcttgcacaagagagggagggactcanaaaaggttagggcaggtgagggagacagtagatggcctgggatgacttgagtccatcatactattgctttggcgggtgtcctcccccatgtttgattcaaattccatgagtgacctacctttccccaggaatgggactganagggtaagtctccacaactcagtctgcacagggctccccgttcaggctgcctt

SEQ ID NO: 866 - DNA, 469 bp, Homo sapiens
agctccaccgcggtggcggccggccatgctctcctcctctgccagtctcctccaccactctctaacctgagagcctgtggaacctgcccgtctcccctcctccatcagacacacctgcctaggaaacaggaaaggacctcggaagtcttctaaggagagtcatggcgtattaccaggagccttcagtggagacctccatcatcaagttcaaagaccaggactttaccaccttgcgggatcactgcctgagcatgggccggacgtttaaggatgagacattccctgcagcagattcttccataggccagaagctgctccaggaaaaacgcctctccaatgtgatatggaagcggccacaggatctaccagggggtcctcctcacttcatcctggatgatataagcagatttgacatccaacaaggaggcgcagctgactgctggttcctggcagcactgggatccttgac

SEQ ID NO: 867 - DNA, 459 bp, Homo sapiens
  misc_feature 353: n = A,T,C or G
ggagctccccgcggtggcggccggccatgctctcctcctctgccagtctcctccaccactctctaacctgagagcctgtggaacctgcccgtctcccctcctccatcagacacacctgcctaggaaacaggaaaggacctcggaagtcttctaaggagagtcatggcgtattaccaggagccttcagtggagacctccatcatcaagttcaaagaccaggactttaccaccttgcgggatcactgcctgagcatgggccggacgtttaaggatgagacattccctgcagcagattcttccataggccagaagctgctccaggaaaaacgcctctccaatgtgatatggaagcngccacaggatctaccagggggtcctcctcacttcatcctggatgatataagcagatttgacatccaacaaggaggcgcagctgactgctggttcctggcagcactg

SEQ ID NO: 868 - DNA, 577 bp, Homo sapiens
  misc_feature 1, 2, 563, 565, 566, 567: n = A,T,C or G
nnattggagctccccgcggtggcggagatgtagtcttcacagtgagttgttatttgtagctgtgtttttgtttttgtatagcttatagcaatgcagtgtgctttttattaacatcattttcttttctttttgcagtgattatttattcaagttacttctgattggcgactcaggggttggaaagtcttgccttcttcttaggtttgcagtaagttgaaattgaaatgtctttacaattaatggtacaattaatgctatgtatgttttctaggtagataaaattaaacagttttattcagaataagttaattcttccagaatttatatatttaaagactccaaatatacatccccagtggtatcttggactgttaaatagaaaaatattgttgctcttaaaagaaattcagtgaagtctggttataaagtcagaatgtctaatacttttggtcagagtcaaacagcagttccaatataggcagcaagttaaaggggtagttggtggcctgtgttgaaagcgacttgatgaaaataaatctttaaattaaactttagtagagcanannnaaaaaaaaaa

SEQ ID NO: 869 - DNA, 619 bp, Homo sapiens
  misc_feature 460, 535, 601: n = A,T,C or G
aggtacaactgcatacacggaacttttgccgtaaccacaacaaacgcccatccagatggctccggcttaagtttctatgcttcactaaccccaaggcccactagtgcagccagcagttgggttttcctctttggcaagtcagtcaggccatacagaatctgctacaagttcccttcctaccagttgaactgtttgctgagcatgcaggaatagcctctgaatagtatggcctgctgtaaagggcaagctggaagtacctgcccgggcggaatgatcaggaggagacagccggcgttgtgtccacccccctcattaggaacggtgactggaccttccagatcctggtgatgctggaaatgactccccagcgtggagatgtctacacctgccacgtggagcaccccagcctccagagccccatcaccgtggagtggcgggctcagtctgaatctgcccagancaagatgctgagtggcgttggaggcttcgtgctggggctgatcttccttgggcttggccttatcatccgtcaaangagtcggaaagggcttctgcactgactcctgaaactgtttaacttaagactggttatcactctttntgtgatgcctgtttgtcc

SEQ ID NO: 870 - DNA, 446 bp, Homo sapiens
  misc_feature 35, 37, 42, 49, 50, 52, 57, 58, 61, 63, 64, 66, 68, 69, 75,80, 93, 95, 99, 101, 102, 103, 109, 110, 113, 117, 123,136, 138, 139, 145, 149, 162, 176, 195, 196, 197, 239, 389: n = A,T,C or G
tggagctccccgcggtggcggccgatgtacacctngngcatncaaccgnntncatgnnttncnncncnngctaanctatncccttaccctctngnggangnnngttgcnnatntttngtctcntttaccgaacggntnnttgagngctnggcgtaatcatangtacatatcttgtngcttcgttcttgaagtcannnacaccacatcgagcggccgcccgggcaggtacaaaagccaanatgcccattgtgggcctgggcacttggaggtctcttctcggcaaagtgaaagaagcggtgaaggtggccattgatgcagaatatcgccacattgactgtgcctatttctatgagaatcaacatgaggtgggagaagccatccaagagaanatccaagagaaggctgtgatgcgggaggacctgttcatcgtcagcaaggtgtggccc

SEQ ID NO: 871 - DNA, 350 bp, Homo sapiens
  misc_feature 3, 4: n = A,T,C or G
gcnnattggagctccccgcggtggcggccgaggtacgggtcctcctcacgagctgccgccgcactgcaccgcacagtgaaacactgcaggttgttactgaggaggaagacacaggctgctgagcaaagtgaggccaagaaccaacatacccacagcagggagggtttcacaggcaaacagggcaatgggcaggggtgacagtcaagtatttgtcaaatattgccaagttaaactgcttctcaataagaggaatgcctcagaatccctgtggtgtgtttttaaaaatatacaactggtccccataacacccctagtgaatcgcaatctctaggggctgaatctggacgtgt

SEQ ID NO: 872 - DNA, 423 bp, Homo sapiens
acgcgggggaaagtgtgtagcacctccaccttctctctctctctccctctccctctcctgccagccaagtgaagacatgcttacttccccttcaccttccttcatgatgttaccattggaatgacatactgcatcctatagttataccatccactctgaaatcaatgtgaatttaacttcagttccatacagaaactttttttccacaggagtttaagcccaagctggagtgcgatggtgcaatcccaactcactgcaacctctgcctcccaggttcaagctattttcctggcttaacctccggagtagctggaattacagatgtgcgcccccatgaccagtaagaaacggttgaactggatgcaatttttatcacagcttgtgtaagactgcctctgtccctcctctcacatgccattggtt

SEQ ID NO: 873 - DNA, 329 bp, Homo sapiens
aggtacgggtcctcctcacgagctgccgccgcactgcaccgcacagtgaaacactgcaggttgttactgaggaggaagacacaggctgctgagcaaagtgaggccaagaaccaacatacccacagcagggagggtttcacaggcaaacagggcaatgggcaggggtgacagtcaagtatttgtcaaatattgccaagttaaactgcttctcaataagaggaatgcctcagaatccctgtggtgtgtttttaaaaatatacaactggtccccataacacccctagtgaatcgcaatctctaggggctgaatctggacgtgtacctgcccg

SEQ ID NO: 874 - DNA, 458 bp, Homo sapiens
  misc_feature 1: n = A,T,C or G
nattggagctccccgcggtggcggccggccatgctctcctcctctgccagtctcctccaccactctctaacctgagagcctgtggaacctgcccgtctcccctcctccatcagacacacctgcctaggaaacaggaaaggacctcggaagtcttctaaggagagtcatggcgtattaccaggagccttcagtggagacctccatcatcaagttcaaagaccaggactttaccaccttgcgggatcactgcctgagcatgggccggacgtttaaggatgagacattccctgcagcagattcttccataggccagaagctgctccaggaaaaacgcctctccaatgtgatatggaagcggccacaggatctaccagggggtcctcctcacttcatcctggatgatataagcagatttgacatccaacaaggaggcgcagctgactgctggttcctggcag

SEQ ID NO: 875 - DNA, 415 bp, Homo sapiens
  misc_feature 43, 322: n = A,T,C or G
gagactttgccttttcaacatggatggttcctcccgctgccgntgccgttccaggagacagcattacagagcatcagttaggtgcagagactgggcagtgcgcccgtgtgcaaagacaggagacacgaatcttcctgaaggagtgacagtctagggaggaaggcagactgcaggggacctacttctctcgggaatctcaatacttggaacaagaacctcctagacggaccctttggcataatgaattggaccaactgtaggttccaggactagagagccagcaatgcctccatgaacaatctcacccaattactctgctcangaaacgaggtaactgatggacagccgaggcagccccttaggcggcttaggcctcccctgtggagcatccctgaggcggactccggccagcccg

SEQ ID NO: 876 - DNA, 357 bp, Homo sapiens
  misc_feature 11, 12, 19, 21, 37, 60, 71, 78, 86, 89, 94, 104, 107, 109,122, 136, 137, 140, 142, 149: n = A,T,C or G
cgatgtactgnnggttctnantcaaggatcccagagntgccaggaaccatcattcatctncgcctccttgntggatgncaaatctnctnatatnatccacgatnaantnaggaggacccccngctagatcctgtgnncgntntcatatnacattggagaggcgtttttcctggagcagcttctggcctatggaagaatctgctgcagggaatgtctcatccttaaacgtccggcccatgctcaggcagtgatcccgcaaggtggtaaagtcctggtctttgaacttgatgatggaggtctccactgaaggctcctggtaatacgccatgactctccttagaagacttccgaggtcct

SEQ ID NO: 877 - DNA, 436 bp, Homo sapiens
gccatgctctcctcctctgccagtctcctccaccactctctaacctgagagcctgtggaacctgcccgtctcccctcctccatcagacacacctgcctaggaaacaggaaaggacctcggaagtcttctaaggagagtcatggcgtattaccaggagccttcagtggagacctccatcatcgagttcaaagaccaggactttaccaccttgcggatcactgcctgagcatgggccggacgtttaaggatgagacattccctgcagcagattcttccataggccagaagctgctccaggaaaaacgcctctccaatgtgatatggaagcggccacaggatctaccagggggtcctcctcacttcatcctggatgatataagcagatttgacatccaacaaggaggcgcagctgactgctggttcctggcagcactgg

SEQ ID NO: 878 - DNA, 213 bp, Homo sapiens
  misc_feature 1, 2: n = A,T,C or G
nnattggagctccccgcggtggcggccgaggtacgcggggagatgatttagggtctctgagagaagaaatttttaaggattcaagaggtgatctggcttttgtgaaagtgtacgcggggacggcgtctgctggcggccgcggagacgcagagtcttgagcagcgcggcaggcaccatgttcctgactgcgctcctctggcgcggccgcattcc

SEQ ID NO: 879 - DNA, 408 bp, Homo sapiens
aggtactgtgggttctgagtcaaggatcccagtgctgccaggaaccagcagtcagctgcgcctccttgttggatgtcaaatctgcttatatcatccaggatgaagtgaggaggaccccctggtagatcctgtggccgcttccatatcacattggagaggcgtttttcctggagcagcttctggcctatggaagaatctgctgcagggaatgtctcatccttaaacgtccggcccatgctcaggcagtgatcccgcaaggtggtaaagtcctggtctttgaacttgatgatggaggtctccactgaaggctcctggtaatacgccatgactctccttagaagacttccgaggtcctttcctgtttcctaggcaggtgtgtctgatggaggaggggagacgggcaggttc

SEQ ID NO: 880 - DNA, 409 bp, Homo sapiens
aggtactgtgggttctgagtcaaggatcccagtgctgccaggaaccagcagtcagctgcgcctccttgttggatgtcaaatctgcttatatcatccaggatgaagtgaggaggaccccctggtagatcctgtggccgcttccatatcacattggagaggcgtttttcctggagcagcttctggcctatggaagaatctgctgcagggaatgtctcatcttaaacgtccggcccatgctcaggcagtgatcccgcaaggtggtaaagtcctggtctttgaacttgatgatggaggtctccactgaaggctcctggtaatacgccatgactctccttagaagacttccgaggtcctttcctgtttcctaggcaggtgtgtctgatggaggaggggagacgggcaggttcca

SEQ ID NO: 881 - DNA, 414 bp, Homo sapiens
ccgggcaggtacctgactttgggtaagttgccagaataagatcatcaggcttggcttggaaattacatactttttcccaccattcttttgataatatcaacgtagggactccatctacttccatgatgttaaacagttctggctttttttccatcgtgggagcgtttttctcaatcttcgccattgggaatcagttgggcttttggcttctctctccctgtgtgagccagtaaaggggataataaggatcattgtttatattctctgtgaatttataattaatgaaaaaggatttttgttgatcttaagctgtagacaatttggtgtgctttgcatgtctttctgtatggttctggtatctcaggcagcagaggaagcagcttgctgcctttagtcaaactgcttcctggaaac

SEQ ID NO: 882 - DNA, 438 bp, Homo sapiens
  misc_feature 4, 224: n = A,T,C or G
ggcnaattggagctccccgcggtggcggccgaggtactgtgggttctgagtcaaggatcccagtgctgccaggaaccagcagtcagctgcgcctccttgttggatgtcaaatctgcttatatcatccaggatgaagtgaggaggaccccctggtagatcctgtggccgcttccatatcacattggagaggcgtttttcctggagcagcttctggcctatggaanaatctgctgcagggaatgtctcatccttaaacgtccggcccatgctcaggcagtgatcccgcaaggtggtaaagtcctggtctttgaacttgatgatggaggtctccactgaaggctcctggtaatacgccatgactctccttagaagacttccgaggtcctttcctgtttcctaggcaggtgtgtctgatggaggaggggagacgggcaggtt

SEQ ID NO: 883 - DNA, 397 bp, Homo sapiens
cgaggtactgtgggttctgagtcaaggatcccagtgctgccaggaaccagcagtcagctgcgcctccttgttggatgtcaaatctgcttatatcatccaggatgaagtgaggaggaccccctggtagatcctgtggccgcttccatatcacattggagaggcgtttttcctggagcagcttctggcctatggaagaatctgctgcagggaatgtctcatccttaaacgtccggcccatgctcaggcagtgatcccgcaaggtggtaaagtcctggtctttgaacttgatgatggaggtctccactgaaggctcctggtaatacgccatgactctccttagaagacttccgaggtcctttcctgtttcctaggcaggtgtgtctgatggaggagggga

SEQ ID NO: 884 - DNA, 470 bp, Homo sapiens
  misc_feature 1: n = A,T,C or G
ngattggagctccccgcggtggcggccgaggtacctgactttgggtaagttgccagaataagatcatcaggcttggcttggaaattacatactttttcccaccattcttttgataatatcaacgtagggactccatctacttccatgatgttaaacagttctggctttttttccatcgtgggagcgtttttctcaatcttcgccattgggaatcagttgggcttttggcttccctctccctgtgtgagccagtaaaggggataataaggatcattgtttatattctctgtgaatttataattaatgaaaaaggatttttgttgatcttaagctgtagacaatttggtgtgctttgcatgtctttctgtatggttctggtatctcaggcagcagaggaagcagcttgctgcctttagtcaaactgcttcctggaaacccagaaccaggtccagctccaggacactgtgcaa

SEQ ID NO: 885 - DNA, 437 bp, Homo sapiens
gccatgctctcctcctctgccagtctcctccaccactctctaacctgagagcctgtggaacctgcccgtctcccctcctccatcagacacacctgcctaggaaacaggaaaggacctcggaagtcttctaaggagagtcatggcgtattaccaggagccttcagtggagacctccatcatcaagttcaaagaccaggactttaccaccttgcgggatcactgcctgagcatgggccggacgtttaaggatgagacattccctgcagcagattcttccataggccagaagctgctccaggaaaaacgcctctccaatgtgatatggaagcggccacaggatctaccagggggtcctcctcacttcatcctggatgatataagcagatttgacatccaacaaggaggcgcagctgactgctggttcctggcagcactgg

SEQ ID NO: 886 - DNA, 386 bp, Homo sapiens
  misc_feature 38, 39, 42, 48, 49, 51, 55, 57, 65, 68, 76, 80, 83, 85, 152,179, 200, 207, 209, 231, 273, 334, 350, 353, 362, 363, 369: n = A,T,C or G
attggagctccccgcggtggcggcccgaggtactgtgnnttnttattnntngatncnattgctgncangaaccaanattnatntncgcctccttgttggatgtcaaatctgcttatatcatccaggatgaagtgaggaggaccccctggtanatcctgtggccgcttccatatcacatnggagaggcgtttttcctggancagcttntntcctatggaaaaatctgctgcngggaatgtctcatccttaaacgtccggcccatgctcaagcantgatcccgcaaggtggtaaagtcctggtctttgaacttgatgatggaggtctccactgaangctcctgggtaatacnccntgactctanntaaaanacttccaggtcctttcc

SEQ ID NO: 887 - DNA, 399 bp, Homo sapiens
cccttagcgtggtcgcggccgaggtacgcggggagctatatcggggatccaaaggtttcacacaggatgagtcctgtgtctacatgcagcgtagcaggagctgggaatggaagcaaaccaatattccagcatctgcttctagaacagtgatcaggatcgctatcgttaataagatgggtgtatgtgggacccaagactcatctgtcaagcccttcttctgactgcttttaaggtgccagtcacgaattgcccgaacattacctgctgatcagaaccagaatgtcggccatactgggaaaaggatgatgcttcgatgcctctgccgtttgacctcacagacatcgtttcagaactcagaggtcagcttctggaagcaaaaccctagaaggagcacaagtc

SEQ ID NO: 888 - DNA, 349 bp, Homo sapiens
actgattggggaagtgataaatgttcatgaaatcttcacaatttatgttcagagattgcagtaaagacaggcgtaagaaattataaaaatattaatgtggggaattaagaaatgtccatgaaatcttcacaatttatgttcttctgccatggcttcagccagtctctctgttgggggtccctgaattcctgcaacagctcagaaactagaggctgagaaagggagtcactcaaaccttgaatccctgtggccagtgaataagatagacgtccagatagctcagcttcaggtccttgagggtcttctcaaaggctttcctcacaaggggtctctcaaagaaagtgggcca

SEQ ID NO: 889 - DNA, 417 bp, Homo sapiens
  misc_feature 1, 6, 7, 10, 17, 31, 33, 35, 40, 44, 47, 48, 49, 55, 56,60, 61, 62, 66, 71, 76, 77, 79, 80, 88, 92, 94, 100, 102,103, 106, 108, 109, 111, 112, 113, 116, 119, 122, 123, 126,127, 137, 138, 139, 143, 148, 179, 286, 321: n = A,T,C or G
nttctnnatntattggntacgctggtctggnananttgancttnagnnntacacnnactnnngacntccanggggnncnnattaccgncatnanccaccntnntgngnngnnnaanatngcnnttnnaacaaacatnnnaaanactcncctgtggcattcgtttcctagggctgcatancaaaataccacaaactggttggcttacaacatcatttagtttcctacagttctggagactggaagtctaggcagcagggccttctgacctctctcattggtttatanatgaaatgcctcttctccctgtgtctttacaaggncttttctgtacctttctatgtcctaatctcctgttcctgtaaagacacagttatattggattaaggcacatccctagtgacttcattttactttaa

SEQ ID NO: 890 - DNA, 468 bp, Homo sapiens
ccgggcaggtaccatgttcaggaaaccaaggacgatattgctctactgttggaaacagagtaatcaaattttctgtgctagccttaattcctgccctctttaagaggagcttaataaaatgtaaatatgcagaatgtttacttttggattgtcccatggtgtccctggaatgctccgagtgcacaagcttaccgcaaggccgaccacacgttctcgggagttcctggacagaccgttcttcacaacgaccacgctcaggtgtaacttcacctgggttcaaggagaccgtgttgggtgccaaagatgtaggggaacctgcctgatacaccacccgcaggctctccccttcccggtggagacgagggaatgagaaaagaaataaagacaaagacacaaagtttaagagttaacaaaagtgggtccaaggatccatcgcaacgtggagattgcaaaggcccccgcgtacct

SEQ ID NO: 891 - DNA, 775 bp, Homo sapiens
  misc_feature 386, 391, 398, 404, 408, 409, 415, 416, 417, 427, 432, 434,436, 470, 474, 496, 500, 513, 519, 523, 530, 535, 537, 555,558, 561, 562, 564, 568, 570, 576, 579, 580, 604, 610, 627,645, 657, 660, 666, 669, 674, 678, 697, 706, 714, 719: n = A,T,C or G
  misc_feature 724, 725, 732, 733, 734, 735, 736, 746, 754, 760: n = A,T,C or G
ccctttcgagcggccgcccgggcaggtactttctcttggtctctgccatcacaatggcagcccgggttcggggttgaattcccagcttaagggatcatcctttgtcttctgtttgtctatgtatttatatgtagtatgtgtgtgtaatataaaagaattttaattaattgctttaataataataagcttaaatcaaatattttgtcacataagtaaaaagtgtaatgccttttagttcatgtgacttaagtaatctttgggaaataaaaacagttttaaagattactggtaaaataaagacatttggtctaaattatgcaggtcagatattaagtttgctaaatgccttaaggtcataaactgctgctttgacttttttttttttngaaanaaaaccncccccngggnnacagannnaaatttcatntcctntnantaaataattaacccctttttaaaaagtccaaaancccncaaaagtccaaaacttaaaaantttnaacactggacccnaggccnaagntaaaacnttttncnttttaaacctccttgggnatnggnncnccantnaaaaangcnngggaaaaactttgtttttttcccnaaaaanttttttaaaaatttttngtaaaaattgcccttttngggttttttttngtnaagggngtntttgnaaanaaaaataaaatttaaaagnttggccccnttgggggnttttnccccnnggaattnnnnnaattttgttngccaaaantttccnaaaaaaaaaaaaaaa

SEQ ID NO: 892 - DNA, 457 bp, Homo sapiens
  misc_feature 32: n = A,T,C or G
attggagctccccgcggtggcggccgcccggncaggtacgcgggggagttctgctctgtactttgcccacttgggttctattcttatctcctcttagctttggctctccagcatggactttgcttgagtctttgatcttgcatcaactgatgtttctagtaagggccgacaccacctctctcccagtgctgacagatgacatccctgctgagtcccgatttccaccagctgtttagcgttctggatcattccctgttgaccagctgcttctggccatcctcacctggacaatctgcagtagttttggcatgttgctcactgcttccattggctgacggtttgaagaagaactgaccagcaagtggttatatctttttgaaggcagtggagtcccgtatggcccaatcaacaacatgaagaatgtatttgcagaacctcaggtattacacaatggcct

SEQ ID NO: 893 - DNA, 197 bp, Homo sapiens
  misc_feature 8, 20, 24, 27, 35, 52, 69, 126, 142, 189: n = A,T,C or G
ccctttcnagcggccgcccnggcnggnacagtgcntcccaaagcccccagangcctacccctgtcgccngtgtgcccacaatgaagaatatacagtcaaggaagatgattttgcagctctaagatntaatttctgccctgtnatctttatgacttgcatgaaccctcttgctcttctctttaagctganatttccct

SEQ ID NO: 894 - DNA, 645 bp, Homo sapiens
  misc_feature 47, 322, 331, 335, 344, 345, 349, 351, 355, 356, 359, 362,363, 369, 371, 372, 378, 380, 383, 384, 390, 395, 396, 399,401, 403, 407, 408, 414, 415, 416, 417, 423, 439, 451, 455,470, 472, 477, 488, 489, 504, 528, 534, 537, 539, 541: n = A,T,C or G
  misc_feature 542, 544, 552, 580, 587, 592, 593, 595, 614, 615, 616, 617,618, 627, 629, 630, 634, 638: n = A,T,C or G
ctacataaatgggggtttcacagttccgttctacaagcagctcctgnggaagccaatccagctgtcggacctggagtccgtggacccagaactgcataagagcttggtgtggattctagagaatgacatcacgcctcccgcgtggcgggctgaggcctgagattccagaaaccgagggaaaaggctcgtctccctcctcctttggagagggcaggccaggggactttcctaggtggctcccacccatttattctcctttattatagtttgcccacccctccatcacccatccaataaaacgcagccaggtttcgccctcagnaaaaaaaantttnacaaaaatnngggnanaacnnaanaannaacctntnnccaaangnccnnttaaanggccnnaancncnaaannggcccnnnngggggnggccgttaaatttttnaaaaaaaaaacnttcnacaccctcccttgancntgaanaaaaaaagganngcacctggggggggnaacttgtttttggcccttttaaanggttcnaantnanncnatgctttncaaatttcccaaaaaaagcatttttttncccgggnttttnntngggggttggcccaacccannnnnggttttttntnntggntggnacccccg

SEQ ID NO: 895 - DNA, 432 bp, Homo sapiens
  misc_feature 325: n = A,T,C or G
ctgattggagctccccgcggtggcggccgaggtaccctttctgcagaaagtataaaaatggccttgctaaggaatttaaatttacattcaagtgctatttctttacagcaccggaaaacaagcatttcaaacaagacctactatacaatgacagtaattaagataatgtgatactggtggaggaataagcacgtagacaaatcgaacataatagagaacccagaaataaacccctacaaatatatacgcaactattttttaacaaagattcaaaagcaattcagtggagaaaaaatgaccttttcaacaaataatggtggagcanttgaacatctacagcaaaaacaaagctcaacttcaacctcacacctgatataaaacatgaataaaaaactatgaaacttttagaaaaataaataaataaaccttagg

SEQ ID NO: 896 - DNA, 640 bp, Homo sapiens
  misc_feature 95, 98, 101, 103, 104, 105, 106, 107, 108, 120, 121, 125,130, 140, 147, 148, 153, 154, 155, 158, 178, 186, 187, 188,189, 190, 201, 202, 203, 204, 205, 206, 207, 212, 213, 214,215, 216, 217, 218, 219, 220, 221, 233, 242, 243, 244: n = A,T,C or G
  misc_feature 250, 251, 264, 266, 269, 277, 278, 281, 293, 294, 295, 301,302, 308, 316, 321, 325, 326, 327, 328, 335, 348, 349, 359,361, 362, 366, 370, 371, 375, 376, 377, 384, 385, 387, 388,393, 398, 399, 411, 412, 415, 427, 432, 433, 434, 439: n = A,T,C or G
  misc_feature 440, 442, 444, 456, 458, 465, 468, 469, 470, 471, 491, 495,496, 497, 500, 505, 511, 514, 519, 522, 523, 524, 525, 528,532, 533, 534, 535, 537, 552, 564, 565, 584, 598, 602, 603,604, 606, 607, 608, 612, 616, 617, 618, 639: n = A,T,C or G
cccttagcgtggtcgcggccgaggtactttttttttttttttttttttttttttttttttttttttttttttttttttttttttttttttttttnccnccnannnnnnaaaaaaaaaaanntttnggggnggaaaaaaanttttttnnttttnnnggnaaaaaaaaaaaaaaaaaaangggggggnnnnnaaaaaaaaaannnnnnnttttnnnnnnnnnncccctttttttnaaaaaaaannntttttnnaaaaaaaaaaaananccncaaaaaannggntttttttttttnnnaaaaanncccccnaatttttnaaaantttnnnnggggggnaaaaaaaaaaaanntccttttttnanntggntttnngggnnnagggttnncnnttttnccccnncaaaaaaaaaannttntttttttaaaanaaaannnacccnntntntttggttttttnanaaaaaanccnnnnccccaaagaggggggggggngccnnnccncttcntttttnttnttttnggnnnngangggnnnncnccaaaaaaaaaaaanaaaaaaaaaaanntttttttttgggggggggntctttttttttttnatannnannncggngggnnnaaaaaaaaaaaaaaaaaaaant

SEQ ID NO: 897 - DNA, 724 bp, Homo sapiens
  misc_feature 635, 679, 688: n = A,T,C or G
aggtacattctcacgaccggcctgatccctgtgctggagaaagaacacgacccccgagtgataaccgtctcctcaggaggaatgttggttcagaaactgaacaccaatgatctccagtccgaaagaacaccatttgatggaactatggtctatgcacaaaacaagaggcagcaagtggttctgacggagcggtgggcccaagggcacccggccatccatttttcttccatgcatcctggctgggccgacaccccaggtcagacaggaatgagcaggagctgaggaaggtagtgggagaggcccagactgcctcaccactccccaggtttttggaaataatgatgcatgaaggtaaatgccagccacaaggacacagctcgaatgatctggaagcgtgttggagcagcggtggaggggagcagaattctcttccggattggcctcaccaactccatgacctcaggcagctcacctgggctctctgcagctctttcctcctctacaaacaagggaactgaaagcagcaacagccacagcacacaccccagggtgcacccgcgggcgccaaagaactggtctcaagcgcttgtcttgcggattaacgcattttgtcctcaagccctctgtggagtggncctactgtcttttatcacacccatttacagatgaagggactgangccccaaanagcttaaaacttccaacccggcctggccatggggtt

SEQ ID NO: 898 - DNA, 379 bp, Homo sapiens
  misc_feature 130, 233: n = A,T,C or G
ccgggcaggtacactcatatggttttactccggcagtcttcttcgtcacactgagattgggactgaagttttctgcacattgactaccttctttaccttcacagagtctctctcccgtatggcttcttanatttcgtccttggtttttgtgttgatcttcaacattcgggtcttcccatttttcccctatagatgccaggttcttgaatgtttcctgcatcacatctctgtanagtttcttctgtgaaggagccagcagagcccactcctcctggctgaagctcacagacacatcctcaaaagccactgagtccattttccggcctcgcgggtgtcccggtgttgtccctaaggttcacggagccagcgcagggtacct

SEQ ID NO: 899 - DNA, 469 bp, Homo sapiens
attggagctccccgcggtggcggccgaggtacaaacttgtttccaggcaaacttgtccaacccatggcccacgggctgcatgaggcccaacacaaattcacaaactttcttaaaacattatgaaatttttttggtgatttttttagttcatcagctattgttagtgtatttcatgtgtggcccaagacaattcctcttccaatgtggcccagggaagccaaaagactggacactcctgtcctagaatatttaatttgggtctgccagagaggttaaaagaatcgtaactttttaaaaagcctgtaattttatttttatttttactagatatggggtcttgttatactaacccaggctagtctcaaactcttggcctcaagaaatcctctcacctcggcctcccaaaatgctggaaatacaggcatgaggaaccacacccagccagcctacaattttaaaacctaaggca

SEQ ID NO: 900 - DNA, 371 bp, Homo sapiens
  misc_feature 346, 361: n = A,T,C or G
cccttagcggccgcccgggcaggtacgcgggggctgctggaaacgcagttccggttaggcggctgagtttgtttacgttgctaacagatctagcccctgctttccctagttccagttccaagatggggaaatccttcgccaacttcatgtgcaagaaagactttcatcctgcctccaaatccaatatcaaaaaagtatggatggcagaacagaaaatatcatatgataaagaagaaacaagaagaattgatgcagcaatatcttaaagaacaagaatcatatgataatagattgcttatgggagatgaacgtgtaaagaatgggccttaatttcatgtattgaagncccccccaggagctnaaaaaaagga

SEQ ID NO: 901 - DNA, 229 bp, Homo sapiens
  misc_feature 213: n = A,T,C or G
ccgggcaggtacgcgggcgtgggggtgagggttgagaacctatgaacattctgtaggggccactgtcttctccacggtgctcccttcaagccaacaaggccacactggtgtgtctcataagtgacttctacccgggagccgtgacagtggcctggaaggcagatagcagccccgtcaaggcgggtgtggagaccaccacaccctccaaacaangcaacaacaagtacct

SEQ ID NO: 902 - DNA, 172 bp, Homo sapiens
actttggcctctctgggatagaagttattcagcaggcacacaacagaggcagttccagatttcaactgcccatcagatggcgggaagatgaagacagatggtgcagccacagttcgtttgatttccaccttggtcccttggccgaacgtccacggagtagtataatattgct

SEQ ID NO: 903 - DNA, 77 bp, Homo sapiens
tcggtcagggaccccggattcccgggtagatgcccagtaaatgagcagtttaggaggctgtcctggtttctgctggt

SEQ ID NO: 904 - DNA, 279 bp, Homo sapiens
  misc_feature 160, 237, 272: n = A,T,C or G
gcgcccggcaggtgatacctccgccggtgacccaggggctctgcgacacaaggaagtctgcatgtctaagtgctagacatgctcagctttgtggatacgcgggactttgttgctgcttgcagtaaccttatgcctaacaacatgccaatctttacaagangtgaagtaaaactttttttaagaatttttaaaaatactttgattcccttggctacaggtgatgtcttctcttggaangggaagaaattaccattaatattgaccattcctanattccca

SEQ ID NO: 905 - DNA, 386 bp, Homo sapiens
aggtactgaggatgaatttcatgccactggcctccaaaaaacccactggaaacattgcacgtggagtagctgtctgtccaggctggcggctggtgaaggaggttgttgccggggttgagattcattacaccacctccttccagaatcatgatcttgagaggtcttgatgaaggctaccatcttgcgcagtcatgtaagagaacttacagcacagctgttccctcaaagtgactttcatttaaaatgcctctcatttacctaaagattctgggtgggaaatccaatagctgtggctgatggaggggaggcagcaggctgcaatctcaccagctcctatagggatggggcaccacgggcgttatcaagtctccccgcgtacctgcccg

SEQ ID NO: 906 - DNA, 326 bp, Homo sapiens
cccttagcgtggtcgcggccgaggtactactgtgtgttgactcttgtaaatcctcccagtgaagagtcatcaaacctgggagtggtcttggggccctgacataccacttcatggagctggtgatggaaatttgctgatgttgttggccacccgaatgagcatgcgagcccctttcatgtgatctccatttttaacatgaatctttactagtatatagctgtgcagaatcatgaggttggtggccatctcggagggaattttgatcttctgggatttcagttctgcatacatactgaagagaacatcgtgtgcattccggtagttgc

SEQ ID NO: 907 - DNA, 506 bp, Homo sapiens
  misc_feature 155, 165, 395, 469, 472, 487, 494: n = A,T,C or G
ccctttcgagcggccgcccgggcaggtacccactcacagtgatgccagcaagaagagactgattgaggatactgaagactggcgtccaaggactggaacaactcagtctcgctctttccgaatccttgcccagatcactgggactgaacattgtnagtgaacttntaggtatcctaatggatgaatgtttttttgccccagagagtggcattgaaactgattggtagttgtcagaaaacaaccccgagacagtttgcttttaaattatgctgtgcataacatgggtaatataaataagaccccaggccgggcacagtggctcacgcctgtaatcccagcgctttgggaggccgaggcaggcagatcatgaggtcatgagttcgagaccagactanccaacatggtgaaaccccgcctttactaaaaatcaaaaattatttgggcatcgtggaaacccctgtaatcccanctntttgggagccttgangcagganaatcattttgaa

SEQ ID NO: 908 - DNA, 495 bp, Homo sapiens
  misc_feature 6, 56, 63, 72, 120, 128, 131, 140, 159, 174, 194, 239, 263,284, 303, 317, 319, 328, 341, 354, 358, 369, 384, 385, 389,395, 401, 415, 422, 450, 457, 466, 474, 477, 480: n = A,T,C or G
caccgnggtggcggccgaggtacttttttttttttttttttttttttttttttcgngctccancaatttttnttttcatgaatgaaagttggggatcagctgttaggttctgtgcccagnacactgantgntgcctggcncccactttttatacagtcnttaacagcaactccntcataggaggctccagccanagtcaggggcaacctgtgagcagtcaggaattgcctagctgactntagtttttgccagtggaccctagngtatactggggaatgcagttnttgtgtagatggaccaagncagttggctcggcntntccttaaantcctaaatttggngtaagcaagctgnttcnctgggccccgnttgtttgaaaacaannttcnctgganaataanacacaagcccactnagccctncaggtggtcctggtaaccaggaaaaccntccccangccatcacnagttcacnttnttngaggggcccaggggg

SEQ ID NO: 909 - DNA, 434 bp, Homo sapiens
  misc_feature 88, 140, 261, 269, 304, 343, 349, 407, 434: n = A,T,C or G
gattggagctccccgcggtggcctggttagcaaatgtttcttcctccctcacaggctataagagcaatgagctggcaacgcccctgancacactgtctgctggttaaccaatggcatgtgagaggagggacagaggcagncttacacaagctgtgataaaaattgcatccagttcaaccgtttcttacctgtggaaaagaagtttctgtatggaactgaagttaaagtcacattgatttcagagtggatggtataactatnggatgcantatgtcattccaatggtaacatcatgaaggaaggngaaggggaagtaagcatgtcttcacttggctggcagganaggganagggagagagagagaaggtggaggtgctacacactttcaaacaaccagatctcatganaattctattatgagccccgcgtacctn

SEQ ID NO: 910 - DNA, 476 bp, Homo sapiens
  misc_feature 324, 337, 346, 454: n = A,T,C or G
aggtacacgctgggggacgctcctgactatgacagaagccagtggctgaatgaagaattcaagctgggcctggactttctcaatctgccctacttgattgatggggctcacaagatcacccagagcaatgccatcctgcgctacattgcccgcaagcacaacctgtgtggggagacagaagaggagaagattcgtgtggacattttggagaaccaggttatggataaccacatggagctggtcaagactgtgctatgacccagattttttgagaaacctgaagccaaaatacttggagggaactccctggaaaaagctaaagcncttactcaagagntttctgggngaagcgggccatggtttgcaggaagacaaggatcaccttttgtgggatttccttgccctatgaatgtcctttggacatgaaagccgttattatttttgagccccaagntggctttggaaccgccctttcc

SEQ ID NO: 911 - DNA, 410 bp, Homo sapiens
  misc_feature 326: n = A,T,C or G
attggagctccaccgcggtggcagcggccgcccgggcaggtaccacttctgccctcagatggtttgaactctcctaagccaagaggctggaatgactgagttgtccaaacagcaaagatggtggctcgtccctacccctcggcactccatcccaaggagaaatcaaaactctgtctgccagagaatatgggtggggttggctggaggccttggttgggaggccctgccctaagatgaggaatggatcaggtcccacttaaagaagcagtctggccatgttttggtagaacagctgtgctgtgctgggaggtcccatcagttctcanttggtgtggtttggactctcctacacccacatgctggaatggctgagttgtccaaacagaaaagatagcggcttgctccttccc

SEQ ID NO: 912 - DNA, 594 bp, Homo sapiens
  misc_feature 223, 254, 263, 334, 363, 397, 407, 422, 425, 436, 515, 546: n = A,T,C or G
cacaaggtgcattctgcttcctgcaggggcttgaaacaccaaggcactccagggatcctggagtcaaagcagcagccccggtatgttgcactccttgggggtgacatgggggtagccgcagtccaccctgtccttggctggcacggcacactggtttgcagacaggcccacgtactcctcagcagagctggagggacaagcaaggccaggaccagccccagcnatgccagagcgctctggcagccatgaccacncgttggggnctcccggggacgccaagctcaggactcccgcgtaccttgccccggggccggcccgctcttagaaactaggngggatccccccgggcttgcaagggaaatnccgatattcaaaagctttatccgattacccgtcngaccctccgnaggggggggggcccnggntaccccaagcntttttgtttccccttttaaggtggaggggtttaaatttggccgccgcctttggccggtaaattcaatgggtccaataancttgttttcccttgttgttgaaaaaatttgnttattcccgcttcaacaaattttccaacaaccaacaattaccgaagcc

SEQ ID NO: 913 - DNA, 766 bp, Homo sapiens
  misc_feature 2, 3, 602, 695, 715, 721, 736: n = A,T,C or G
cnnattggagctccaccgcggtggccgagcggccgcccgggcaggtacttttgtatgacactagacttctgctgtagtgcttcacccaaaacagaggtttaaggaaataaaaaaataaaaataatacagaaaaaaaaccaaaacactttactgaaaattttcatttcaaccagaagcaaacgtgttctaagaaggcaaagtagagttaggaacaactccgtgtttccctcaggaataaacgtgatctttcacacttgggggttgatagtcagcatggagtaacttagaccaacttaagaaggaggcatctggggctgttcacctaaggagatgcttcccagaggcccagcatcttgggagaacaccccaagttctctggagaggtcaggagtttgggatgcaggatcacactgaaggtcagcccagcaaagcagctgatctaggatatgggcttctgacttccagattctaccatcatcacagaggctcaaagctggggcccacaccaaaagggcgtgatgattcccagccttcagcacaacaggaattgacctggaaagaaaggcctttattcctctgacagaaaaacctgattcccaaangaaaatgatacttttaccttattccctttctcaatggatctgcattttcatgaatgaagaaaagaagaaagttgaattctctgacttaggaangtttcttattaaaaaggttncaatanacttcaacttttttnaagctgggcagcaaaaaaaaaaaaaaaaaa

SEQ ID NO: 914 - DNA, 570 bp, Homo sapiens
  misc_feature 431: n = A,T,C or G
gaattggactccaccgcggtggcggtacagcttggagtgatcccccacggtttcaattttaaacctctcatcatctgaaatctcctcgtaggatttacaccaggtgaactgagacgcgtctgtcatttcctggcagtcgaagcccagatagatgttgccttgttcatcgacaccagcactgatttccttggtgcctggtctcgcctctaccaacacaggctccgacgtgtctgagggcttccccacgccatttgcattgactgcccggaccctgaagacataggtcttaccttgctgcaggtcagaagacctttaaaataacggtttggctgttggtcgtcctgattgacaggtgatccactcctccagccattccctcctccctggaagtccaccgaaatatccagaaaacagggcttgctgccgggagntacctccggccgctctaagaactaagtgggatcccccgggctgcagggaattcgattattcaagcttatcgataccggtccgaccttcgaagggggggggccccggtaccccaagcttttggttcccttttagtggagg

SEQ ID NO: 915 - DNA, 415 bp, Homo sapiens
aggctaagggaggctatgggaggctaagggaggctcaggtaaggaggatctcttgagcctgggaggcagaagctgcagtgagccaaaatggcaccactgcactccagcctgagtaacagagtaagactctgtctcaaaaaaagaaaagaaaagaaaaaaagaattcaaaggagaactgacatatcacccagtgggtatattacagaatgcttgcatgtatgtgtgtgtgtgtatggttttatatatatttatataaagtataaatgcttttgcttatatatatgaatctcattttcccactggctttccttaaaaactaaacaaaacacaaacaccttactgatctttagtagctcgtaagctgatttttagcctttcagctgagaggaaatggtccaaaaaaaaaaaaaaaaaa

SEQ ID NO: 916 - DNA, 487 bp, Homo sapiens
tgattggagctccccgcggtggcggccgaggtacatgcattgggattcatcaaggaaacaaagctggaccaaagatggctgactagaagcagtgaggactcttggctctcatggagagaaatgaaaggggcaagtaaatacagcaacttcaactgaaacattcatgttctcacattgagactgatcagggaaagagctcaacccatgcagaaaggagaaaagcaaagcagggcgacagcccactaggaaggacatggagccaagggaacctctccctgcccaggcaaacagtgaatgaatatgtgacccctagcaaccgcacttcttccatggacctttgcaactcttgggtcaggagatcccctcatgaatccactccaccaagacttggtctgacacacaaagctgcatgaagtctctgctaagcaactgcccaggggtgcacagagtcccaggagctttacatactctggccccaggatccctg

SEQ ID NO: 917 - DNA, 389 bp, Homo sapiens
  misc_feature 52, 58, 59, 62, 63, 64, 73, 78, 79, 80, 91, 92, 93, 95, 110,111, 113, 114, 116, 117, 118, 128, 138, 139, 140, 141, 144,145, 149, 150, 151, 160, 172, 178, 185, 190, 199, 201, 204,205, 206, 207, 210, 211, 214, 216, 220, 225, 228: n = A,T,C or G
  misc_feature 234, 242, 247, 248, 254, 255, 256, 257, 258, 259, 260, 262,263, 266, 267, 268, 270, 272, 297, 298, 299, 305, 308, 309,312, 319, 324, 329, 330, 331, 332, 333, 334, 342, 346, 363,365: n = A,T,C or G
cccttagcgtggtcgcggccgaggtacttttttttttttttttttttttttngggggnnggnnnaaaaaaaantttannntggggaaaaannncnaaaaaaaccccccannanntnnntttttttttnaaaaaaaaannnnaanntttnnnttttttttnaaaaaaattttncccccnggggggnttaanccccaaaantnaannnnccnnttngnaaancccanggntttttntttttttnccccnnaaattnnnnnnncnnggnnngncntttaaaattttttttttttaaaaannnaaaaanttnnccnaaagggnttttnccaannnnnnaaaaaaangggntttttttaaaaaaaaancnttttttttttttttaaaaaaaaaa

SEQ ID NO: 918 - DNA, 260 bp, Homo sapiens
  misc_feature 2, 5, 34, 36, 38, 39, 40, 45, 46, 47, 48, 49, 72, 73, 74,77, 79, 81, 91, 92, 107, 111, 114, 116, 117, 125, 126, 146,151, 152, 158, 159, 165, 166, 168, 169, 170, 192, 208, 214,215, 230, 234, 235, 236, 253, 254: n = A,T,C or G
anccncaaaaaaaaaaaaaaaaaaaacccccccncncnnnggggnnnnnaaaaaaaaaaaaaaaaaaggggnnnggngngnaaaaaaaaannggggggggggggggncccncananncccccccnngaaaaaaaaaaaaaaaaacnccccnngggggnnaaaaannannntttttttttttttccccccccngggggggggggggggncccccnnttttttttttttttnaaannngaaaaaccccccccccnnaaaaaa

SEQ ID NO: 919 - DNA, 360 bp, Homo sapiens
ccctttcgagcggccgcccgggcaggtacgcgggaatgtcattatgtgacaaaccaatttttttgtgcctctgtttcctcatttgtgaaaattggactaaataatctttaaggtctctttttcttttgcagttctaatatcagttccttgcgcattttatattcattttgaaaagtaatttataagtattagtaactagaagaaccttttattctaaaattttaatatttaaaaaaaaacacccccccaaaaaacaagttcaatgtgaggagccagaatctatcatttgtaagttaaggctaaatacagattctgaatttgaggtgctttaaggaaatgaaaaaaaaaaaaaaaaaaaaa

SEQ ID NO: 920 - DNA, 350 bp, Homo sapiens
aggtacgcgggggaaagtgtgtagcacctccaccttctctctctctctccctctccctctcctgccagccaagtgaagacatgcttacttccccttcaccttccttcatgatgttaccattggaatgacatactgcatcctatagttataccatccactctgaaatcaatgtgaatttaacttcagttccatacagaaacttcttttccacagatggagtttaagcccaagctggagtgcgatggtgcaatcccaactcactgcaacctctgcctcccaggttcaagctattttcctggcttagcctccggagtagctggaattacagatgtgcgcccccatgaccagta

SEQ ID NO: 921 - DNA, 253 bp, Homo sapiens
ggtactgagctccacaaacgtggccatggttggtgcggaaatgattctgagtgagcaggtagaagtctcacgtcctgctgtgtccagagttggttccttccagagggttcgtggtctcgctggcttcaagaatgaagcccgtggaccttcacagtgtgtgttacaagctgttaaagatgttgtgtctggagtttgttccttcagatgtgtctggagtttctcccttctggtgggtttgtggtgtccctgactt

SEQ ID NO: 922 - DNA, 359 bp, Homo sapiens
  misc_feature 13, 23, 25, 26, 28, 32, 37, 40, 42, 45, 48, 52, 57, 67, 71,75, 79, 83, 86, 105, 112, 116, 122, 124, 132, 134, 139,140, 143, 144, 147, 156, 168, 179, 186, 198, 204, 207, 219,222, 227, 242, 243, 279, 288, 292, 308, 313, 314, 320: n = A,T,C or G
  misc_feature 321, 328, 333, 347: n = A,T,C or G
acttttttttttngttttttttngnnantacntcccnggntnggnagngggnaattngcccccctgntgcnttcnttgnatgnggnacccgtttttaaggctccntttccgnaatnaaaccntnattccccntnacccnnggnnacnatggtaggnacggcaactacnatcaaaagttnatagggnaaactttcaaangggtcntcnccgcccccgctnacntgccngggcggccgcccggnnaggaacttttttttttttttttttttttttttaaanaaaaaaaancccntttttttttttttttnggggnngggggnnaaaaaanttttngggggggggggccntttttttttaaa

SEQ ID NO: 923 - DNA, 434 bp, Homo sapiens
  misc_feature 67, 115: n = A,T,C or G
ccccgcggtggcggccgaggtacaggtttgtagccaaaaagcaataggctataccataatagtgcangtgcgtataaggcttttacataaaggttttatgacctgtatgatgttnacacaacaacaaaattgcctagtggtgcatttactataacatatcccatccttaagggacacgtgaatgtatatacacacacacacatatacacatattaccaaatggatacatacgtggttacctacagaaaaatttaaactttgaaataatactcttagggaatgttacctttttaaaagatattctttaaatttatatttgctattatgtgccttaccaatattcacatgtaacattgccatttcactaagggattttttatattagcattttaatcagcacatttggtggtctgtttaccctgtgttatgagtta

SEQ ID NO: 924 - DNA, 292 bp, Homo sapiens
  misc_feature 7, 8, 29, 47, 49, 52, 55, 74, 104, 112, 151, 156, 157, 158,163, 172, 186, 192, 229, 230, 236, 259, 286: n = A,T,C or G
aaattcnntgcgctactaccacctgctgnacatggagtccctggccncncanatncatggcgtggagttttcgnagtggctgctgaaaaaactcaaaccgaacnaagcgctnttccgcctggccgaggaaacgggcgtcatcctgttgccnggccnnngcttnaggaccacncatccgtccggccnttgtcnctggccaacctgaacaaataccactatgccaacatcnngccgcnccatccgcaacatggcgtccganttctttgccgtgtttgaaaaggaaaanggcggc

SEQ ID NO: 925 - DNA, 364 bp, Homo sapiens
  misc_feature 45, 86, 108, 237, 245: n = A,T,C or G
gacacgctttccttgaactgaaatttccccataaagaaaaaccanatttggagttcgttcttgaaatgtcctcaccacaactgatnaaaacacatctcccttcacatntgattccaccatctatctggaaagaaaactgcaagattgtctatgtggccagaaatcccaaggattgcctggtgtcctactaccactttcacaggatggcttcctttatgcctgatcctcagaacttanaggaattntatgagaaattcatgtcccggaaaagttgttggcgggtcctggtttgaccatgtgaaaggatggtgggctgcaaaagacatgcaccggatcctctacctcttctacgaggatattaaaa

SEQ ID NO: 926 - DNA, 558 bp, Homo sapiens
  misc_feature 48, 52, 65, 79, 86, 95, 100, 121, 139, 162, 165, 182, 203,274, 296, 308, 313, 334, 338, 343, 344, 362, 375, 399, 412,415, 419, 435, 443, 471, 485, 494, 499, 502, 509, 517, 521,525, 539, 540: n = A,T,C or G
aattggagctccccgcggtggcggccgaggtactgaactccacaaacntggncatggttggtgcngaaatgattctgantgagcangtaaaattntcacntcctgctgtgtccagagttgnttccttccaaagggttcntggtctccctggcttcaaaaatnaanccggggaccttctcagngtgtgttacaagctgttaaanatgttgtgtctggagtttgttccttcaaatgtgtctggagtttctcccttctggtgggtttgtggtgtctntgacttcaagaattaacccggngactgtcgtggngatcnttgtagctcttaaaggggggngtgnacccnnaccagtgggcatcagcangatttttcgtcangagggtaagaacaaagtttccacngtgtggaagggtntcntgancggttccctgctcccntgtacctncccgggcgggcgatctaaaactattggntcccccgggctaanaagaattcnatatnaancttatcnattccgtngaancttngaggggggggcccnncaacccaggtttttgttt

SEQ ID NO: 927 - DNA, 492 bp, Homo sapiens
  misc_feature 22, 115, 128, 154, 158, 172, 184, 186, 188, 189, 211, 225,227, 230, 233, 244, 251, 253, 254, 260, 261, 266, 270, 272,275, 287, 288, 294, 296, 307, 316, 317, 321, 326, 335, 336,361, 368, 370, 375, 378, 381, 402, 420, 426, 434, 443: n = A,T,C or G
  misc_feature 450, 452, 456, 460, 465, 469, 484: n = A,T,C or G
ccctttcgagcggccgcccggncaggtacagtctctgcttcactcctggctacacaattgaaaggcgcattggaggactgattttccctccttcctacatacctatttgttatgntcaaaaattaaanttgatcaaatgtacttttcatggtantagnggttaaaataacantgagtcttatgntncnnttattttattgaactttatttnggtttttctcaaanantgntgntggattaattnaaattanannttgtgnntattncatngnttntttttaaccagnntgtaanangttctttttangtggtaaanntacntctcnacctttaanncttttaattttatgtatgtaaaccnaaattgngngtgtnaanaanggccttggaacccatttaatngggtcttttaatagtccncaaaanaaccttcnctttgggtnaggttantnttcnaaanttttnttcnctttcaaatccccanttttcttt

SEQ ID NO: 928 - DNA, 331 bp, Homo sapiens
  misc_feature 27, 35, 122, 125, 131, 137, 138, 139, 140, 148, 154, 155,169, 170, 174, 188, 190, 196, 197, 207, 209, 210, 211, 215,216, 220, 222, 225, 235, 236, 237, 238, 239, 243, 244, 256,268, 275, 277, 289, 290, 292, 293, 297, 313, 315: n = A,T,C or G
acttttttttttttttttttttttttnaaaaaatntttttttttttttttttttttttttttttttttttttttttttttttttttttttttttttttttttttaaaaaaaaaaaaattttntanattttncccccnnnncccccccntttttnngggggggggggggnnaaanaaaaaaaaaaaaantntttttnnaaaaaaaaancnnntttnngggngnacncaaaaaaaannnnngggnnaaaaaaaaaaanttttttaaaacnttttttncntcaaaaatttanncnncccnaaaaaaaaaaaaaacncntttttttttttaaaaa

SEQ ID NO: 929 - DNA, 422 bp, Homo sapiens
  misc_feature 28, 179, 190, 195, 201, 204, 225, 228, 332, 340, 355, 404: n = A,T,C or G
cccttagcgtggtcgcggccgaggtacncggggaggccatctcgctataggaaaggaaagtggaacagcattcatcctcaacatttttacgaagacaaaatgaagactggagtagaagactgatcagtgcaggtgtagcataaaagtgtaatcctggaagatgtggtgtgagaaggtancacaagtgaancaganatacanganatagggaagggaagctggaancanaggtcactggagggagagggagatgggcacattcagggctacaaagcaaagttctatgtgatttactcacctctcaattgtgggacccctcaaaatgtgtacangtactctnccagtgacatgcttnttgaccacaatggatgaactgtgcccagcatgcccacttttcaatgctncacttgatccccatgttt

SEQ ID NO: 930 - DNA, 487 bp, Homo sapiens
  misc_feature 1, 20, 74, 75, 119, 121, 167, 168, 169, 171, 180, 181, 188,190, 191, 192, 193, 195, 196, 197, 198, 206, 207, 209, 210,211, 212, 213, 214, 215, 216, 217, 218, 219, 221, 222, 241,244, 259, 260, 261, 262, 270, 271, 272, 284, 285, 286: n = A,T,C or G
  misc_feature 287, 288, 289, 290, 293, 294, 300, 301, 302, 317, 318, 325,327, 335, 345, 352, 353, 354, 366, 368, 369, 372, 375, 381,387, 391, 406, 417, 418, 422, 424, 428, 432, 433, 434, 439,442, 459, 460, 461, 462, 463, 464, 471, 474, 475, 479: n = A,T,C or G
ngaaactactactgagggcnaattggagctccccgcggtggcggccgaggtacttttttttttttttttttttnntttttttttttttttttttttttttttttttttttttttttttntntttttttttttttttttttttttttttttttttaaaaaaaaaaaannnanttttttttnnaaaaaanannnncnnnngggggggnnannnnnnnnnnntnnttaaaaaaaaaaagggggnagnaaaaaaaaaaaaaannnnttttaaannnggggcccccccnnnnnnnttnnataaannnaaaaaaaaaaaaaannttttttnancccccccngggggggggnttttttnnncccccccccccncnnttnttnttattnaaaaanaagnggccccccccccccnaaaaaaaaaannaatntnactnaaannntgggnccncataaaataaaaaaaannnnnngcccccnctnngganaaaaaaaa

SEQ ID NO: 931 - DNA, 322 bp, Homo sapiens
  misc_feature 68, 94, 95, 167, 171, 172, 173, 186, 192, 207, 211, 214,218, 219, 227, 229, 230, 233, 237, 242, 245, 248, 259, 261,262, 264, 265, 266, 271, 274, 279, 280, 282, 283, 287, 289,291, 293, 296, 297, 298, 301, 303, 306, 312: n = A,T,C or G
gggcgaattggagctccccgcggtggcggccgaggtacgggaaggtgaaaaaaaaaaaaaaaaaaaancccctttttttttttttttttttttnntttttttttttttttttttttttttttttttttttttttttttttttttttttttttttttttttttctttntctnnnttttttttttttnttcttntttttttttttttangtanccncccnncccgcccnanntcntttnttttnttnccnccccccccccnanntnnntttcnggnggggnntnnctcncncntnttnnncancnccncccccngggggggggg

SEQ ID NO: 932 - DNA, 225 bp, Homo sapiens
  misc_feature 48, 51, 91, 92, 93, 94, 105, 106, 107, 119, 120, 121, 125,126, 129, 130, 132, 133, 136, 137, 139, 140, 143, 158, 166,167, 177, 178, 187, 188, 192, 194, 195, 199, 206: n = A,T,C or G
aggtacgcgggggttgtgatgttttttttttttttaaaaaaaaatccnaantttttaaaaaaaaaaaaaaaaaaaaaaacccccccccccnnnnaaaaaaaaaannncccccccccccnnnaaannaanntnnaanntnnttnaaccccccccccccngggggggnncccccccccnnctttttttnntttnannaaanaaaaaanaccccccccccaaaaaaaa

SEQ ID NO: 933 - DNA, 285 bp, Homo sapiens
  misc_feature 59, 67, 69, 73: n = A,T,C or G
gatatctgcagaattcgcccttagcgtggtcgcggcccgaggtactttttttttttttnttttatantngttnggggtcttatatgcgctatgaatatgaatatgacagcttcacggctccaacgtaattatagaaaataaaaataatatgacattactttggcaggcaggcatacattttcatttaatatgacacaataagattactactttctcccaaaagttaactcctattgccaataaaaacttacttctagttctttaattttttcttctgctattttc

SEQ ID NO: 934 - DNA, 453 bp, Homo sapiens
ccctttcgagcggcccgcccgggcaggtactgggattacaggtgtgagccaccatgcctggcctgtaaaactcactttcaataccagggataagaggaggggctaagtgaagaagaaattacttgaaaagcctaagaaaaccagatctatgcttactgcaaaacttaattctgaaaatgttttagtaattaaatctggctgttcagttgagagaagaatatgaaacgatgaggagtctctgaatttggaatctacacagaatggtggatttagaagcataatagaaatcagtgcatcttattagctgccttggttctttgattgttttcttcgggttccaagaatttttaggatctgaaaatcacgacaaaccaaaacagagagagataaatctgtgcagaaaacatcaaatctatggccacccgcgtacctcggccgcgaccacgctaaggg

SEQ ID NO: 935 - DNA, 421 bp, Homo sapiens
ccctttcgagcggccgcccgggcaggtacaaggcatgatgagtccttttgcttttaggcttttgacttctggttttagactttctttagcttctgttgttagacaacattgtgtaagcttggtttttataagtttgcatggattaaactgaacttaatgaaattgtccctccccccaaattctcagcacaatttttaggcccacaaggagtcaagcacctcaaggagatcttcagtttgaacttggtgtaagacacagggatactgatgaatcaatattcaaattagctgttacctacttaagaaagagaggagaccttggggatttcgaggaagggttccgtaagggagattttagctgagaaataccatttgcacagtcaatcacttctgaccaaagttatcagaaaaaggagaaaaag

SEQ ID NO: 936 - DNA, 557 bp, Homo sapiens
  misc_feature 370, 392, 447, 454, 504, 545: n = A,T,C or G
ccctttcgagcggcgcccgggcaggtacgcgggggccatagtgaagaaggaactgctgtctgtggtggctgggggagacaactacagggtcaataacaagcacgatgacagatacacaccactgccttccaacaaaatcgtcaagcgggcagaggagttggtggggcaggagttgccttattcgctgaccagtgacaactgcgagcacttcgtgaaccatctgcgctatggcgtctcccgcagtgaccaggtcactggtgcagtcacgacagtaggtgtggcagcaggcctgctggctgccgcaagccttgtgggggatcctgcttggccagaaagcaagcgggaaaggcaataaatccaagaaattgtnccaacaaccaccaattcttacngaggaatattatttaaccagcaaggagtggaggtttggtttactgattttactgntttgggntcatgaaattttattttaatgggagttaaaaacacaggaaaatgtatttngaaatgcaacttaatattgaattttttaaaagacacaattnggcttttggaaa

SEQ ID NO: 937 - DNA, 624 bp, Homo sapiens
  misc_feature 76, 79, 395, 418, 486, 493, 553, 567, 573, 579, 596, 600: n = A,T,C or G
ccctttcgagcggccgcccgggcaggtactggatcagtttctcctgcgtgaggtatgggtgacactcaacctgcancancaaacaatcctcatcacggggaaagccggctctgttttgcattgttcctagggagttctggttaagtcactggtttatatttcaagtccaggtttgttcaagagcctctcgatctggaagtggttgaaatttgagaccccaagggctttcaccagcccctcgtccaccagctcctccatggcctccaggcatccaagaacgttccttttccactgatcatattacctttatcatctttggggaaaaagtcatccccaagtcttgaatccctgtggccaagtgaaataagatagacgttcagatagcccagcttcangtccttgagggtcttcttcaaangctttcctcacaaaggggtctctcaaaagaaagtgggccacaccttgctgacgatgaacaaggtcctnccgcatnaaaacccttctttgggatccttttcttggatggcttcttcccacctcatgttgaattctnataaaaatagggcncagtcnaatgtngcgatattcttgcattnaatnggccacctttaccggtttttttta

SEQ ID NO: 938 - DNA, 396 bp, Homo sapiens
  misc_feature 85, 221: n = A,T,C or G
cccttagcgtggtcgcggccgaggtacgcggggagggaaccgctcagatacccttccacaccgtggaaactttgttcttaccctnttgacaaaaaatcttgctgctgctcactctttgggtccacaccacctttaagagctacaacgatcaccacgacagtctgcggcttcattcttgaagtcagcgacaccacaaacccaccagaagggagaaactccanacacatctgaaggaacaaactccagacacaacatctttaacagctgtaacacacactgtgaaggtccacggcttcattcttgaagccagcgagaccacgaaccctttggaaggaaccaactctggacacaagcaagaccgtgagacttctacctgctcactcaaaatcatttccg

SEQ ID NO: 939 - DNA, 407 bp, Homo sapiens
  misc_feature 193, 322, 325, 329, 330, 344, 384, 397: n = A,T,C or G
cccttagcgtggtcgcggccgaggtcggccgaggtacaaaagccaagatgcccattgtgggcctgggcacttggaggtctcttctcggcaaagtgaaagaagcggtgaaggtggccattgatgcagaatatcgccacattgactgtgcctatttctatgagaatcaacatgaggtgggagaagccatccaagnagaagatccaagagaaggctgtgatgcgggaggacctgttcatcgtcagcaaggttgtggccccactttctttgagagaccccctttgtgaggaaagcccttttgagaaagacccttcaagggacttgnaanctgnncctatctggaaccnttctatctttattcacttggccacaagggggatttcaagnactgggggggatnggactttttt

SEQ ID NO: 940 - DNA, 407 bp, Homo sapiens; identical to SEQ ID NO: 939
  misc_feature 193, 322, 325, 329, 330, 344, 384, 397: n = A,T,C or G

SEQ ID NO: 941 - DNA, 421 bp, Homo sapiens
cccttagcgtggtcgcggccgaggtaccctgcgctggctccgtgaaccttagggacaacaccgggacacccgcgaggccggaaaatggactcagtggcttttgaggatgtgtctgtgagcttcagccaggaggagtgggctctgctggctccttcacagaagaaactctacagagatgtgatgcaggaaacattcaagaacctggcatctataggggaaaaatgggaagacccgaatgttgaagatcaacacaaaaaccaaggacgaaatctaagaagccatacgggagagagactctgtgaaggtaaagaaggtagtcaatgtgcagaaaacttcagtcccaatctcagtgtgacgaagaagactgccggagtaaaaccatatgagtgtacctgcccgggcggccgctcgaaagggcgaa

SEQ ID NO: 942 - DNA, 425 bp, Homo sapiens
  misc_feature 31, 32, 33, 35, 36, 42, 45, 46, 49, 56, 58, 64, 67, 68, 73,81, 85, 87, 88, 92, 98, 101, 102, 106, 112, 113, 114, 128,149, 156, 159, 164, 176, 194, 202, 209, 214, 223, 239, 273,274, 278, 282: n = A,T,C or G
ccctttcgagcggccgcccgggcaggtacannngnncagatnccnnttntgggccngngcactntanngtctnttcttggnaaantnnaagnctcccntanngacnccattnnnccggaatatcaccncattgactcggcctatatctntgagaancancttcnacatggcaaaanccctccaagacacacatncttacacnactctcnacatnccggaaggnacctgctaatcgtcancaaggtgtggcccactttctttgagagacccctnntgangaangcctttgagaaaccctcgggacctgaagctgagctatctggacgtctatcttattcactggccacagggattcaagactggggatgactttttccccaaagatgataaaggtaatatgatcagtggaaaaggaaccttcttgg

SEQ ID NO: 943 - DNA, 333 bp, Homo sapiens
ccctttcgagcggccgcccgggcaggtactggtgaactccctcacttgaatttctcgttcttatgaaggtgctttcttgcttggatagttgttcagtgtgacattcctgcagggtgaacaattgctagagggttctattcagccatctttctccacctcacatccatgtttttgcatgttatttctttccttttattgattagcatttgattccatgaatatagcacaatgtatataaccactattcttttctggaaaacttatgtccaggttggggttattatgaataaggctatgaaatttcaggtacctcggccgcgaccacgctaaggg

SEQ ID NO: 944 - DNA, 457 bp, Homo sapiens
cccttagcgtggtcgcggccgaggtacaaatctgttgccagcctgaacacacctgtaggaggtggatggagaccctggttgagaggtctcacccagccagtagaaacaggatcagggacctgcttgaagaagcagtctagccccacttttgtagaacaactgagctgtgctgggataccatttctgcccctcatggtgttgggttctccaaaacctggaagctggaacggctaaattgcagaaacagcaaagatggcagcctgcccctctctctagtaactctgtcccaggatgctttcaaacccttgtcaaccagagaacatcagtgggagaggctgaagaccctggttgggaagttctcccaagtgaggaggaacagatcagggacctgcttaaagaagcggtcttgccacgcttttgtagagcagttgtgtcatgctggggtacctgcccgggc

SEQ ID NO: 945 - DNA, 778 bp, Homo sapiens
  misc_feature 53, 63, 64, 210, 251, 281, 413, 429, 445, 449, 492, 535,580, 653, 672, 675, 676, 692, 711, 721, 722, 748, 769: n = A,T,C or G
acaaaagccaagatgcccattgtgggcctgggcacttggaggtctcttctcgncaaagttganngaagcggttgaaggtggccattgatgcagaatatcggccacattgactgtgcctatttctatgagaatcaacatgaggtgggagaagccatccaagagaagatccaagagaaggctgtgatgcgggaggacctgttcatcgtcagnaaggtgtggcccactttctttgagagaccccttgtggaggnaaagcctttgagaagaccctcaagggaccntggaagcttgaagcctatctgggaccgtctattcttaattcacttggcccaccaggggatttcaaggacctggggggattgacctttttccccaaaggatggattaaaagggtaaattatggatcaggtggnaaaaagggaaccgttncttgggatgcctgggnaggnccatgggagggagcttggtggggaccgaagggggcttgggtgnaaagccccttgggggtcttcaaaatttcaaccccacttccagnatccgaagaggctctttgaaccaaaacctggactggaaatataanacccagtggactaacccaggtttgagtggtcacccattccttaacgccaggaagaaaaccttgatccaagttncccttccgggcccgcctcntannaacttaggtgggaatnccccccgggggcttgccanggaaattccnnattatccaaagcctttatccggattncccggcccgaaccttccgganggggggggg

SEQ ID NO: 946 - DNA, 553 bp, Homo sapiens
  misc_feature 97, 286, 323, 366, 417, 420, 443, 501, 528, 529, 531, 532,538: n = A,T,C or G
tccaccgcggtggcggccgaggtacagtgggagagtgaggtgggagaagaagagtgtctggtaggtgtgctcactgtcttcttggctgagaatgttnaattggaagagtgggccgctcagagctcctacaaaggcagagcaaagcttcttagctgacattgtttgagaaattgttggcaggctctggaatgcttgtttggctttcttgcggtgcctttggtgtcttgtttttcttcacattgcccttgaaatgatcacagggggcactgcttctttggcagcccanacactgtcatgaatttttcttctcggggctcctcaangaaccaaatcttttgcacctcacatttcttgggcccgcctttnctggggaagccatcctccttagaagcctggccctcggtccccttgtggggnctnttggccgaccccccttgggaatnttcagggctgcttagaagaacccattgggaccattcaagccatttaagttgggcaagncaaaccaggggaagggaagggggaaannannattttnagaaaacctttttca

SEQ ID NO: 947 - DNA, 561 bp, Homo sapiens
  misc_feature 216, 310, 315, 321, 323, 326, 327, 329, 344, 345, 346, 358,362, 375, 384, 390, 391, 434, 461, 462, 470, 473, 482, 484,485, 513, 541, 555: n = A,T,C or G
tgggccgggaggcagtgctgatccggctgctcctccagcccttcagacgagatcctgtttcagctaaatgcagggaaactcaatgtttttttaagttttgttttccctttaaagcctttttttaggccacattgacagtggtgggcggggagaagatagggaacactcatccctggtcgtctatcccagtgtgtgttttaacatttcacagcccangaacccacagatgtgtctgggagagcctggcaaggcattcctcatcaccatcgttgtttgcaaaaggtttaaaacaaaaacaaaaaaaaccacntctgnaaaaananatnngnttatattatagaatnnnagtttccctttngggncccggcttcttangaaacctanggtggnnattccccccccgggggcctggccaaggggaaatttccgaattnttccaaaggccttttatttcggaattnnccccggtncgnaccccttcngnnaggggggggggggggccccccggggtancccccaagcctttttttggtttcccccnttttaaaggtgggngggggg

SEQ ID NO: 948 - DNA, 185 bp, Homo sapiens
  misc_feature 1, 6, 17, 21, 29, 33, 36, 37, 39, 46, 52, 72, 89, 126, 165: n = A,T,C or G
ncctgncaggtactgtnctcnacaaacgngggnatnntnggagctnaattgngttaagacatcaggctccanatatgaactttcagcanaagcgcttgccgggagcaaagggacagaaaagctganatgaacagtgcctggcaacaatcacagccgggcaagggngctccgagcctcgcatcccc

SEQ ID NO: 949 - DNA, 203 bp, Homo sapiens
  misc_feature 22, 27, 28, 29, 48, 50, 97, 155, 184: n = A,T,C or G
tcgaggggggggccccgggtancccannntttttgtatccctttttangnggaggggttaaatttgcgccgcttggccgttaatcaatggtcattanctggttttccttggtgtggaaaattgtttattcccgctcacaaattccaccaccaaanattacgaagcccggggaagcataaaaagntggtaaaaagccctggggg

SEQ ID NO: 950 - DNA, 387 bp, Homo sapiens
  misc_feature 3: n = A,T,C or G
ctncctgagggcgaattggagctccccgcggtggcggccgaggtactgattggggaagtgataaatgttcatgaaatcttcacaatttatgttcagagattgcagtaaagacaggcgtaagaaattataaaaatattaatgtggggaattaagaaatgtccatgaaatcttcacaatttatgttcttctgccatggcttcagccagtctctctgttgggggtccctgaattcctgcaacagctcagaaactagaggctgagaaagggagtcactcaaaccttgaatccctgtggccagtgaataagatagacgtccagatagctcagcttcaggtccttgagggtcttctcaaaggctttcctcacaaggggtctctcaaagaaagt

SEQ ID NO: 951 - DNA, 336 bp, Homo sapiens
ccgggcaggtacgcggggacagctgggaggacacccacatggtcggcgtgcaggatatttcgctggaccctagaaaagccaccacgacctgtgggccatgatgctaccccaatggctgctgctgctgttccttctcttctcctttctcttcctcctcaccaggggctcactttctccaacaaaatacaaccttttgtcccctccaggcatccaccgtctgcacagacttaccccggcccccacgtagagaccaccctgcctggcaggagccagaggagctcaaggagtcttgcatccggaaccaggactgcgagactggctgctgccaacgtgctc

SEQ ID NO: 952 - DNA, 614 bp, Homo sapiens
  misc_feature 317, 321, 445, 487, 511, 533, 550, 579, 604: n = A,T,C or G
tttgagaagccagcgctcacccacccggggtctctgtgcattgacctttgggtgctgacttggagaaaagcacaaacacgaccagtcccatcctggctcccgtggggcttcttctatctacgcattgtatcgactgcattagttggactaagatgatgactcagttaaaggaggagacaaatgctgactgtctaagcaagaatggcccaagctggcaagaaaaagcacactgcatacataggatacagaaggggcaggagcttctgcctgccgggatctgcaaccatttacattttgttttgcctgcaaaacctatnaagnaagggatttcctgtttggcccaggggagtcttccactggaacaaacaaaaatgggcagttcaaaaaggttcttggaggtggtcccttattccaagccagcccaggagtcccttcatccgtcatnccacggggaagagtcttttgagggggaaacatggaagtccangctcatgcctctgcctatggggtncaatttctttcggggaatcacntgtggatcatggatatntttcattaacccccttgcgggacccaccnatggttttcaaggggtggctttttncccccttttt

SEQ ID NO: 953 - DNA, 238 bp, Homo sapiens
ttgtcagctgtgagcgttgcggggctggtggggtgtgtttgagtatgtaagtgtctatttcctgtgctctaacagtgactatttcagttctaacccttcaattgctaattggatgggggaatggcctcttagattgtccttgttttgacttatctgctaaggcgagagaatgtctgggtttgccacacagtcccgcagggacccctgctctttgccaggatttttatatcaagtacct

SEQ ID NO: 954 - DNA, 351 bp, Homo sapiens
  misc_feature 45, 47, 69, 81, 88, 118, 184, 190, 195, 200, 207, 238, 246,247, 259, 263, 266, 267, 270, 277, 280, 283, 298, 300, 322,335, 338, 342: n = A,T,C or G
attccgatatcaagcttatcggatactcgtacgaccctcggaggngngggggcccgggataccccagcntttttgtttccnttttaantggaggggtttaaattgccgccgccttggncgttaaattcatgggttcatagcctgtttcctgtgtggaaaattgttaatcccggctcacaaattncacacnaaacnataangaagccncgggggaggcaataaaaggtggtaaaaagancctggcgnntgcccctaaatngaanttnnaanctaaagnttnaancattgtcaaatttgncngtttggccgccttcaacttggnccccgcttttttncangtcnggggggaaa

SEQ ID NO: 955 - DNA, 584 bp, Homo sapiens
  misc_feature 48, 289, 335, 342, 350, 385, 418, 459, 571: n = A,T,C or G
atgggcgaattggactccaccgcggtggcggccgtcgccatggtgaanctgagcaaagaggccaagcagagactacagcagctcttcaaggggagccagtttgccattcgctggggctttatccctcttgtgatttacctgggatttaagaggggtgcagatcccggaatgcctgaaccaactgttttgagcctactttggggataaaggattatttggtcttctggatttggaggcaatcagcggacagcatggaagatgtgtgctctggctcggataagagatgggncatcattcagtcacctagttgggatggcaccaaggctcttcacagnacgcatntgttagcnagcagtgggcaacttggtacctcggcccgctctantaacctaggtgggatcccccgggcctgcaaggnaattcgatatcaagcctttatccgatacccgtgcgacctcnaggggggggggcccggtaccccagctttttgttcccctttagtgaggggtttaaattggcgccgcttggcgtaatcatgggtcaataagctggaatcctgtgtggaaattgnttattcccgctca

SEQ ID NO: 956 - DNA, 828 bp, Homo sapiens
  misc_feature 47, 381, 388, 598, 609, 728, 760, 768, 774, 777, 782, 787,800, 802, 808, 810, 813, 815, 816: n = A,T,C or G
aggtacaaaagccaagatgcccattgtgggcctgggcacttggaggnctcttctcggcaaagtgaaagaagcggtgaaggtggccattgatgcagaatatcgccacattgactgtgcctatttctatgagaatcaacatgaggtgggagaagccatccaagagaagatccaagagaaggctgtgatgcgggaggacctgttcatcgtcagcaaggtgtggcccactttctttgagagaccccttgtgaggaaagcctttgagaagaccctcaagggacctgaaagctgagcctatcctgggacgtctatcttatttcacttggccacaggggattcaaggactgggggatggactttttccccaaaagatgataaaaggtnaaatatngatccagtgggaaaaagggaaccgttcttgggatgccctgggggaggcccatggggagggagctggtgggaccgaagggggcctggttgaaaagcccctttggggttcttcaaaattttcaacccacttttccaggaatccgaagaggggctcttttgaaacaaaaacccttgggacttggaaaattattaaaaacccaagtggaccttnaaccccagggntttggaagttggttccaccccccattaccctttcaccggccaagggaaggaaaaaccttggattccccaggttaccctttggcccccgggggggccggggccgccttcttaaaaaactnagatgggaatccccccccggggccttgccagnggaaattncggatnatnaaagnctttntctgaattacccngncggaancnttngnngggggggggggc

SEQ ID NO: 957 - DNA, 390 bp, Homo sapiens
ggcggccgaggtacaaagtgtgaggtaggccacccagaaacaccaactccgaagaaatggagtcagttttccgaagtagggagtgaaggcttcatttatgtgggctgagacagtggagtttttagcaggattacaacattattcatacaaggttggtgtgtatgttatagcaatttgattggctctaggtgatgtttctttttggggaggggatatttaacattttcttaacagagggtgtaataagtcctgggttttctttcacctggtctaagcgaagcagggcaatgaagggggagttaatctacaacaagggtcattaattcagagggcgggaggcttttgaccctgacatggtttccctttagtcaatgtacctgcccgggcggc

SEQ ID NO: 958 - DNA, 439 bp, Homo sapiens
aggtacgcgggagcagggaactgctcagatacccttccacaccgtggaaactttgttcttaccctcttgacgaaaaatcttgctgctgctcactctttgggtccacaccacctttaagagctacaacgatcatcacgacagtctgcggcttcattcttgaagtcagcgacaccccaaacccaccagaagggagaaactccaggcacatctgaaggaacaaactccagacacaacatctttaacagctgtaacacacactgtgaaggtccacggcttcattcttgaagccagcgagaccacgaaccctctggaaggaaccaactctggacacagcaggacgtgagacttctacctgctcactcagaatcatttccgcaccaaccatggccacgtttgtggagctcagtacaaaagccaagatgcccattgtgggcctggg

SEQ ID NO: 959 - DNA, 304 bp, Homo sapiens
  misc_feature 56, 57, 58, 62, 63, 64, 73, 76, 77, 122, 138, 160, 171, 176,209, 217, 244: n = A,T,C or G
aggtacaaaagccaagatgcccattgtgggcctgggcacttggaggtctcttctcnnnaaannnaaagtttancgnncgcccgggcaggtactggatcagtttctcctgcgtgaggtatggntgacactcaacctggntagtcactggtttatatttcantccaggtttgntcaanagcctctcgatctggaagtggttgaaatttganaccccaanggctttcaccagcccctcgtccaccanctcctccatggcctcccaggcatccaagaacgttccttttccacttgatcatattacctt

SEQ ID NO: 960 - DNA, 789 bp, Homo sapiens
  misc_feature 7, 21, 23, 108, 219, 242, 395, 476, 510, 522, 547, 556, 574,648, 659, 674, 677, 687, 689, 698, 705, 738, 741, 756, 759,779: n = A,T,C or G
ggcccgnccgggcaggtacanangccaagatgcccattgtgggcctgggcacttggaggtctcttctcggcaaagtgaaagaagcggtgaaggtggccattgatgcanaatatcgccacattgactgtgcctatttctatgagaatcaacatgaggtgggagaagccatccaagagaagatccaagagaaggctgtgatgcgggaggacctgttcatcntcagcaaggtgtggcccactttntttgagagaccccttgtgaggaaagcctttgaagaagaccctcaaggacctgaaagctgaagctatctgggacgtcttattctttattcactggcccacagggattcaaagactggggggatgactttttccccaaaagatgataaaagggtnattattggattcagtgggaaaaaagggaaccgtttcttgggattgccctggggaggcccatggaaggagcctggtgggacnaaggggcttggttggaaaagcccctttgggggtnctcaaaattttnaacccactttccagaatccgaaganggcttcttngaaacaaaaccttggganctggaaaatataaaacccagtggacttaacccagggttggagttgttaccccattaccctttacgccagggaanaaaactggatnccaagttacccttcnggnccgcttcttnanaactttgtngggattnccccccggggcctgggaggggaaatttcgattnttnaaaggccttattcgntanccccgtcggacccctcctangggggggggg

SEQ ID NO: 961 - DNA, 583 bp, Homo sapiens
  misc_feature 1, 3, 199, 423, 451, 470, 512, 523, 529, 537, 555, 562: n = A,T,C or G
nanctccaccgcggtggctgacggatgaggactctgggctgctggaataggacactcaagacttttggctgccattttgtttgttcagtggagactccctggccaacagaatccttcttgatagtttgcaggcaaaacaaatgtaatgttgcagatccgcaggcagaagctctgcccttctgtatcctatgtatgcagngtgctttttcttgccagcttgggccattcttgcttagacagtcagcatttgtctcctcctttaactgagtcatcatcttaagtccaactaatgcagtcgatacaaatgccgtagataggaaggaagccccacgggggagccagggatgggacttggtccgtgtttgtgcttttctccaagtcagcacccaaaggtcaatgcacagaagacccccgggtggggtngaagccgctggcttcttcaaaaccggcncgctcttaggaactaagtngggatcccccgggggcttggcagggaattcgataatcaaagncttatccgatncccgtncgaccctnggaggggggggcccgggnaccccanctttttgggtccctttaagtg

SEQ ID NO: 962 - DNA, 560 bp, Homo sapiens
  misc_feature 210, 307, 328, 363, 375, 390, 402, 439, 443, 524, 530, 540,544: n = A,T,C or G
ccgggcaggtacgcggggagcagggaactcgctcagatacccttccacaccgtggaaactttgttcttaccctcttgacgaaaaatcttgctgctgctcactctttgggtccacaccacctttaagagctacaacgatcaccacgacagtctgcggcttcattcttgaagtcagcgacaccacaaacccaccagaagggagaaactccanacacatctgaaggaacaaactccagacacaacatctttaacagctgtaacacacacttgtgaagggttccaccggctttcatttcttggaagccagncggagacccaccgaacccttntgggaaagggaaccaacttcttgggacacaggcangggacgttgaanactttctacctgctnacttcagaaatnaattttccggcacccaaccccattgggccacgttttngtgnggagcttcagtaccaaaaagccaaggattgccccatttgttgggccctgggccactttgggagggtctccttctttcgggnaaaaanatggaaaaanaaanccgggtggaaaaggtg

SEQ ID NO: 963 - DNA, 342 bp, Homo sapiens
  misc_feature 215: n = A,T,C or G
aggtactttctacacagaaccaagtaaagagaaggaggccggaactacaccagcaaaagactggacccttgtcgaaactcctcctggggaggaacaagccaagcagaatgccaactcccagctgtccatcttgttcattgaaaaacctcaaggaggaacagtgaaagttggtgaagatatcaccttcatagccaaagtcaaggctgaagatcttntgagaaaacccactatcaaatggttcaaaggaaaatggatggacctggccagcaaagccgggaagcaccttcagctgaaaggaaaccttttgagaggcacagtcgggtgttaccttgcccgggcggc

SEQ ID NO: 964 - DNA, 87 bp, Homo sapiens
  misc_feature 77: n = A,T,C or G
gctgcaggaatttcggatattcaaagctttatcgattacccggtccgacctcgaaggggggggccccggtaccccancttttgttcc

SEQ ID NO: 965 - DNA, 423 bp, Homo sapiens
  misc_feature 36, 50, 53, 59, 62, 63, 68, 69, 70, 75, 79, 80, 83, 91, 94,97, 99, 104, 125, 132, 143, 149, 156, 164, 167, 173, 176,180, 181: n = A,T,C or G
aattggagctccccgcggtggcggccgatgtacaantaccggaatgcccnttntgggcnagnncactnnnaggcntatnnttnccgaaganctngangnggggnccgtggcccttgatgcagaanctttacncattggctgtncctctncttgtcntaatcatngtnatgtgnganaacnnatccaagagaagatccaagagaaggctgtgatgcgggaggacctgttcatcgtcagcaaggtgtggcccactttctttgagagaccccttgtgaggaaagcctttgagaagaccctcaaggacctgaagctgagctatctggacgtctatcttattcactggcccagggattcaagactggggatgactttttccccaaagatgataaaggtaatatgatcagtggaaaaggaacgttcttg

SEQ ID NO: 966 - DNA, 261 bp, Homo sapiens
  misc_feature 36, 61, 66, 81, 82, 84, 90, 92, 100, 109, 118, 135, 143,147, 157, 165, 169: n = A,T,C or G
agggcgaattggagctccccgcggtggcggcccgangtactgatctccacaaacgtggccntggtnggtgcggaaatgatnntnagtgancnggtaaaantctcacgtnctgctgtgnccagagttggttccttncagagggntcgnggtctccctngcttcaanaatnaagccttggaccttcacagtgtgtgttacagctgttaaagatgttgtgtctggagtttgttccttcagatgtgtctggagtttctcccttct

SEQ ID NO: 967 - DNA, 187 bp, Homo sapiens
  misc_feature 4, 9, 11, 12, 27, 29, 31, 36, 37, 38, 43, 46, 54, 58, 60,61, 69, 70, 75, 78, 79, 80, 81, 83, 87, 89, 90, 104, 112,120, 129, 133, 135, 138, 146, 149: n = A,T,C or G
catnacatncnnctattggatcttctntngnatggnnnttccnacntaatgttnattntnntagaaatnngcacnggnnnngnggcnannttctgcatcaatgnccacctangccgattntttcacttngccnanaanagaccttnaantgcccatgcccacaatgggcatcttggcttttgtacct

SEQ ID NO: 968 - DNA, 122 bp, Homo sapiens
  misc_feature 19: n = A,T,C or G
aagctccacaaacgtggtnatggttggtgcggaaatgattctgagtgagcaggtagaagtctcacgtcctgctgtgtccagagttggttccttccagagggttcgtggtctcgctggcttca

SEQ ID NO: 969 - DNA, 122 bp, Homo sapiens; identical to SEQ ID NO: 968
  misc_feature 19: n = A,T,C or G

SEQ ID NO: 970 - DNA, 180 bp, Homo sapiens
  misc_feature 11, 19, 31, 50, 51, 70, 77, 80, 82, 83: n = A,T,C or G
ctccccgcggnggcggccntccgggcaggtnttaaagccattttgcccanngtgggcctgggcactgggnggtttcnaancnncaaagtgaaagaagcggtgaaggtggccattgatgcagaatatcgccacattgactgtgcctatttctatgagaatcaacatgaggtgggagaaagc

SEQ ID NO: 971 - DNA, 718 bp, Homo sapiens
  misc_feature 264, 343, 432, 472, 480, 485, 491, 492, 497, 501, 510, 512,516, 543, 553, 560, 574, 578, 583, 599, 605, 609, 614, 616,617, 624, 627, 631, 638, 639, 641, 649, 651, 652, 657, 663,665, 679, 683, 684, 692, 702, 706: n = A,T,C or G
agctccaccgcggtggtcgagcggccgcccgggcaggtacgcggggctctctcgccaggcgtcctcgtggaagtgacatcgtctttaaaccctgcgtggcaatccctgacgcaccgccgtgatgcccagggaagacagggcgacctggaagtccaactacttccttaagatcatccaactattggatgattatccgaaatgtttcattgtgggagcagacaatgtgggctccaagcagatgcagcagatccgcatgtcccttcncgggaaggctgtggtgttgatgggcaaagaacaccatgatgcgcaaggccatcccgagggcacctggaaaacaacccanctctggagaaactgctgcctcatatccgggggaatgtgggctttgtgttcaccaaggaggacctcactgagatcagggacatgttgctngccaataaggtgccactgctgcccgtgctggtgccattgncccatgtnaagtnactgtnncagcncaanaaacacttntntttnggccctagaaagaacttctttttttcnaggcttttangttattnaccacttaaaattntttnaaggnggcaccattttgaaantccttnagtngattntnncaccttnatnaaanaacttgnnanaacaaaantnngggancccaantnaaacccaccccttntttnnaaacattnctttaaaaantttncccccttttttc

SEQ ID NO: 972 - DNA, 204 bp, Homo sapiens
acacagccttcaacccatttcctggcatacaactcctaacatcccgagaatatccaaagtgatgcccttttctaatgttgactgatggatggaagcccatagttagcttcagaattagggctgctcaccagaaagaccaaggcatgattacagaattagaactttcagtcccatcccctgacttccggggaggggagaggagct

SEQ ID NO: 973 - DNA, 299 bp, Homo sapiens
  misc_feature 20, 24, 25, 27, 29, 35, 43, 48, 71, 78, 79, 83, 87, 96, 100,102, 108, 110, 111, 113, 125, 126, 153, 163, 184, 203, 206,213, 239, 242, 263, 266: n = A,T,C or G
actttttttttttttttttntttnngnantatttntttttttnttatnttttttttcaaaggtttttattntatctanntttncttngattgttanacantnggcatncnnanaacaactacaannaccactcctccgtgctggactccaacngctccttctngctctacagcaagctcaccgnggacaagagcaggtggcancangggaacntcttctcatgctccatgatgcatganggnctgcacaaccactacacgcanaanaacctatccctgtctccgggtaaatgagtgcga

SEQ ID NO: 974 - DNA, 257 bp, Homo sapiens
  misc_feature 2, 3: n = A,T,C or G
cnnattggagctccccgcggtggcggccgaggtacgcgggatcattgatcaagttcagaggctctgatttgaaacgtgcatgcttgaatacgccatggaggagctggtggacgaggggctggtgaaagcccttggggtctcaaatttcaaccacttccagatcgagaggctcttgaacaaacctggactgaaatataaaccagtgactaaccaggttgagtgtcacccatacctcacgcaggagaaactgatccagt

SEQ ID NO: 975 - DNA, 467 bp, Homo sapiens
ctgattggagctccccgcggtggcgttgattctcatagaaataggcacagtcaatgtggcgatattctgcatcaatggccaccttcaccgcttctttcactttgccgagaagagacctccaagtgcccaggcccacaatgggcatcttggcttttgtactgagctccacaaacgtggccatggttggtgcggaaatgattctgagtgagcgggtagaagtctcacgtcctgctgtgtccagagttgttccttccagagggttcgtggtctcgctggcttcaagaatgaagccgtggaccttcacagtgtgtgttacagctgttaaagatgttgtgtctggagtttgttccttcagatgtgtctggagtttctcccttctggtgggtttgtggtgtcgctgacttcaagaatgaagcccgcagactgtcgtggtgatcgttgtagctcttaaaggtggtgtggaccca

SEQ ID NO: 976 - DNA, 389 bp, Homo sapiens
  misc_feature 7, 36, 38, 41, 51, 77, 79, 80, 82, 95, 106, 142, 148, 149,151, 178, 190, 191, 200, 201, 206, 207, 233, 236, 248, 260,266, 269, 270, 271, 283, 292, 300, 302, 303, 305, 310, 311,312, 316, 317, 318, 344, 346, 358, 359, 361, 380: n = A,T,C or G
tagggcnaattggagctccccgcggtggcggccgangnacnaggtacactnatatggttttactccggcagtcttcnannanacactgatattgngactgaagggntctgcacattttctaccttctttaccttccagagtntctctnncntatggcttcttacatttcgtccttggnttttgagttgannttcaacatnnggggnntcccatttttcccctatagatgccangancttgaatgtttnctgcatcacatntctccncannntcttctgtaaangatccaacncagcccantnntnctggnnnaaannnacagacacattctaaaaagccactgncnccattttccggnntntcgggtgtcccggtgttgnccctaaggt

SEQ ID NO: 977 - DNA, 357 bp, Homo sapiens
aggtaccgctttggtgacctcagcgtgacctacgagcccatggcctacatggatgctgcctactttggtgagatcagcatcgggactccaccccagaacttcctggtcctttttgacaccggctcctccaacttgtgggtgccctctgtctactgccagagccaggcctgcaccagtcactcccgcttcaaccccagcgagtcgtccacctactccaccaatgggtagaccttctccctgcagtatggcagtggcagcctcaccggcttctttggctatgacaccctgactgtccagagcatccaggtccccaaccaggagttcggcttgagtgagaatgagcctggtacctgcccg

SEQ ID NO: 978 - DNA, 292 bp, Homo sapiens
  misc_feature 190, 194, 198, 220, 234, 255, 264, 276: n = A,T,C or G
gcgtaatcatggtcataagctgtttcctggtgtggaaattgttattccgcttcacaattttcacacaacatacgaagcccgggagcattaaaagtgtaaagcctggggggtgccttaatgagtggagccaacctcacattaaattgcggttgcgcttcaattggcccggtttttcaagtcggggaaaaanctgntcgnggcccaacctgcatttaattgnaattcggcccaacncccccgggggaagaaggcggntttcgggtntttggggggggntttttttgggtttttt

SEQ ID NO: 979 - DNA, 337 bp, Homo sapiens
  misc_feature 259, 312: n = A,T,C or G
ccgggcaggtacaaatctgttgccagcctgaacacacctgtaggaggtggatggagaccctggttgagaggtctcacccagccagtagaaacaggatcagggacctgcttgaagaagcagtctagccccacttttgtagaacagctgagctgtgctgggataccatttctgcccctcatggtgttgggttctccaaaacctggaagctggaacggctaaattgcagaaacagcaaagatggcaagcctgcccctctctntagtaactctgtcccaggatgctttcaaacccttgtcaaccagagaacatcantgggagagggcttgaaaaccccttg

SEQ ID NO: 980 - DNA, 109 bp, Homo sapiens
cactacttagggcgaattggagctccccgcggtggcggccgaggtacaaaagccaagatgcccattgtgggcctgggcacttggaggtctcttctcggcaaagtgaaag

SEQ ID NO: 981 - DNA, 468 bp, Homo sapiens
gattggagctccccgcggtggcgttgattctcatagaaataggcacagtcaatgtggcgatattctgcatcaatggccaccttcaccgcttctttcactttgccgagaagagacctccaagtgcccaggcccacaatgggcatcttggcttttgtactgagctccacaaacgtggccatggttggtgcggaaatgattctgagtgagcgggtagaagtctcacgtcctgctgtgtccagagttggttccttccagagggttcgtggtctcgctggcttcaagaatgaagccgtggaccttcacagtgtgtgttacagctgttaaagatgttgtgtctggagtttgttccttcagatgtgtctggagtttctcccttctggtgggtttgtggtgtcgctgacttcaagaatgaagccgcagactgtcgtggtgatcgttgtagctcttaaaggtggtgtggacccaaag

SEQ ID NO: 982 - DNA, 357 bp, Homo sapiens
  misc_feature 15, 30, 31, 41, 46, 48, 64, 68, 79, 80, 86, 90, 99, 105,113, 114, 119, 126, 129, 136, 138, 143, 149, 154, 156, 163,166, 170, 175, 181, 182, 221, 236, 237, 247, 248, 250, 255,262, 267, 273, 274, 279, 280, 283, 284, 285, 299, 305: n = A,T,C or G
  misc_feature 308, 312, 325, 335: n = A,T,C or G
cccttagcgtggtcncggccgacgtacacnnggagagtgangtggnanaagaagagtgtctggnaagngtgctcactgnnttcttngctnataatgttnaattgnaagagagnncgctnagagctnctncaaaggnanaacanagcttnttaantnacattgntanacanattgntggcannctctggaatgcttgcatggctttaatgtggtgccttgcngtgtcctgttttctnncacattgccnntnaaatnatcaaangggcnctgatnntttgnnatnnnaaacactgaaattnattttnttntcgngagctctcacganccaatctttncactcacattcttggccgcctt

SEQ ID NO: 983 - DNA, 469 bp, Homo sapiens
  misc_feature 381, 448: n = A,T,C or G
cccttagcggcccgcccgggcaggtactttttttttttttttttttttttttaccatctcagcaaatacatggttcttaaaaacatacatgtccatttctatgtctcccacaaaacatctgagtaattacctccagacaatgtgtgctaaacttcgagttttgaatattgctttaaattattgctaccacttgtatatgactttattgtttaccaagcacttgtatatattacctagtatgtacaacaacacggtaaagtatgtatttatcaagaaaaaataaccaagattcagaaaaactacgagaattaaataaggtcactcaccttgtaaacgatatagccaggttttacaacgaggtgcgctcaatcacaaagtatntgcttttccccaatatcttctttaactataaacatttatttaatgcccactaattgccaagaattgngctagaaactttcaaattttg

SEQ ID NO: 984 - DNA, 529 bp, Homo sapiens
  misc_feature 24, 98, 272, 459, 484: n = A,T,C or G
cccttagcggccgcccgggcaggnactttttttttttttttttttttttttaccatctcagcaaatacatggttcttaaaaacatacatgtccatttntatgtctcccacaaaacatctgagtaattacctccagacaatgtgtgctaaacttcgagttttgaatattgctttaaattattgctaccacttgtatatgactttattgtttaccaagcacttgtatatattacctagtatgtacaacaacacggtaaagtatgtatttatcanaaaaaataaccaagattcagaaaaactacgagaattaaataaggtcactcaccttgtaaacgatatagccaggttttacaacgaggtgcgctcaatcacaaagtatatgcttttccccaatatcttctttaactataaacatttatttaatgcccactaattgccaagaattgtgctagaaactttnaaattttgtcttactctggtaattntcatgagggattaccgtatgtatcatgcttgatagtttattttca

SEQ ID NO: 985 - DNA, 206 bp, Homo sapiens
  misc_feature 9, 12, 13, 15, 22, 37, 48, 62, 63, 88, 89, 99, 105, 108,118, 126, 132, 141, 144, 146, 149, 150, 151, 152, 158, 165,168, 169, 180, 182, 183, 184, 188, 190, 191, 192: n = A,T,C or G
cccttggcngcnngngcccggnctggtactgattggngaagtgataantgtacatgaaatcnntacaatgcatgtgcaaagatggcanngacacatgcntctcanatnataaaaatantactgtgnggaatnaagaaatgntcntnaannnntaacanggaatgntcnngtgccatggcntnnnccantnnntctggtggggggcc

SEQ ID NO: 986 - DNA, 300 bp, Homo sapiens
  misc_feature 26, 36, 89, 92, 98, 102, 126, 138, 144, 195, 199, 211, 219,284, 290: n = A,T,C or G
aaatgagactgcctcaaaaaaaaaanaatgaaactntattttaggctgttctggaggattcattagtgctcccattcgaatgtatttanganacccgnacanggttgcaaaagatgggctttgtangccatttgcatnttggtnaaatgggaccctttccaacaggatcaaaaccttttatattggccacagaanattnttgtctcatttnacaaacgnggggactacaactaactatatagtgtaattctttaaagatttgaaaaaaattgtcaaagtaatanatattncattcttttt

SEQ ID NO: 987 - DNA, 542 bp, Homo sapiens
  misc_feature 269, 444: n = A,T,C or G
cccttagcgtggtcgcggccgaggtaccagagggcaagaagcaggggaagagcccctggaagcacacagaggtgttctgctccatcccatcccgctccctgctctccccaagctactaccacagctttggagtcaccgagaactatgtcatcttccttgagcagcctttcaggttggatattctcaagatggcaaccgcatacatccggagaatgagctgggcctcctgcctggctttccacagggaggagaagacttatatccacatnatcgaccaaaggaccaggcagcctgtgcagaccaagttttacacagacgccatggtggtcttccatcacgtcaacgcctacgaagaggacggctgcatcgtgtttgacgtcattgcctacgaggacaacaagcctctaccagctcttctacctggccaacctgaaccaggacttnaaggagaaactccaggctcacctcggtccccacccttaaggaggtttgccgtgcccctccacgtggacaagaaatgcagaagtgggcacaaaatttaa

SEQ ID NO: 988 - DNA, 461 bp, Homo sapiens
  misc_feature 6, 22, 52, 56, 92, 189, 221, 222, 235, 301, 304, 323, 364,365, 370, 377, 392, 416, 436, 440, 446: n = A,T,C or G
cccttncgagcggccgcccggncaggtactgccactccaagggcatcaccgntacngcctacagccccctgggctctccggatagaccttgngcctaacctgaggacccttccctactggaggatcccaagattaaggagattgctgcaaagcacaaaaaaaccacagcccaggttctgatccgtttcnatatccagaggaatgtgacagggatccccaanntctatgacaccancacacattgttggagaacattcaggtctttggactttaaattgaagtggatgaggagaatggcaancantacttcagccttcaaccanaaacctgggaggggccctttttgaactttcaaagggaaatnnttctncattttnggaagggaccttttnccccttttgaatggcaagaaaatnatttggagggtttgaaattnttcnctgggntgaggaatttaccac

SEQ ID NO: 989 - DNA, 375 bp, Homo sapiens
  misc_feature 42, 57, 289, 332: n = A,T,C or G
ccctttcgacggccgcccgggcaggtacagttgaagctgcanagttttaccagtggncaatttcttgtgtttcatttaaagaacagtttcacaaaggggctttattgtgccattgtgggggccacgtgccaatcaatagcatgggacaaagtaagtaaaggcatgaagaaacaaacaagcaaattcacgaaaacagaagtgcttaaattaaccaagtgacagtttgtgcatcagtctcacaatgggctgtcacatgaaatgaggggcagaagagggtgaagtacctcgncccgcgacccacctaaggggccgaatttccaggcacacttggncggcccgttactagtggatcccgagctcggggccaagcttggg

SEQ ID NO: 990 - DNA, 75 bp, Homo sapiens
  misc_feature 2, 4, 6, 8, 17, 19, 21, 43: n = A,T,C or G
angngngntcgagcggncntnagatgtgatgcgatatctgcancaattcgcccttagcgtggtcgcggccgaggt

SEQ ID NO: 991 - DNA, 185 bp, Homo sapiens
  misc_feature 46, 69, 81, 97: n = A,T,C or G
ctcacactggacaccttttaaaataacaacaaggaaaacccagctnagtccaaactccatggtgagttntctgtgtgcagncctgatcagcacgcanaaacagctgggaatcccagggctggggctcctccccgcgtacctgcccgggcggccgctcgaaagggcgaattccagcacactggcgg

SEQ ID NO: 992 - DNA, 402 bp, Homo sapiens
  misc_feature 54, 60, 61, 67, 70, 78, 85, 86, 90, 91, 92, 98, 99, 100,109, 110, 123, 126, 128, 129, 133, 150, 151, 152, 155, 169,177, 182, 185, 198, 199, 200, 201, 202, 206, 210, 216, 217,218, 219, 222, 223, 224, 225, 233, 234, 236, 237, 239: n = A,T,C or G
  misc_feature 244, 247, 248, 249, 255, 256, 258, 267, 268, 269, 270, 271,276, 278, 282, 291, 292, 294, 299, 303, 305, 308, 309, 310,321, 331, 332, 334, 336, 340, 349, 353, 363, 364, 365, 384,391, 396: n = A,T,C or G
ccctttcgagcggccgcccgggcaggtactttattttttttttttttttttcgngaaaanngggggnaancttttttntaaaaanntttnnnaaaaannntttttaaannggggaaatttttncananngggnaaaaaaagggttttttnnnggnaattttttcccccnttcccaanaaaanaancccttttttaaannnnncccntttnaaaacnnnnttnnnnccccaaannanngnaaaanttnnnaaaaanncnttttttttnnnnnccccnanaganaaaaaaaanngnttttntatngnggnnnaaataccccangatttttttnncncnggtnttttaaacncttnaaaaaaaaannnccccccaataaaattggtnttgggtnggganaaaaaa

SEQ ID NO: 993 - DNA, 358 bp, Homo sapiens
  misc_feature 33, 60, 62, 64, 68, 70, 76, 85, 87, 88, 90, 94, 95, 96, 98,103, 108, 109, 111, 114, 115, 121, 125, 128, 143, 145, 146,147, 148, 151, 153, 154, 155, 156, 159, 161, 166, 167, 170,177, 179, 181, 188, 190, 194, 202, 205, 223, 224, 225: n = A,T,C or G
  misc_feature 231, 233, 245, 246, 247, 255, 257, 259, 264, 265, 271, 274,281, 290, 291, 292, 296, 302, 306, 307, 308, 309, 311, 312,314, 315, 324, 325, 326, 328, 329, 341, 342, 343, 347, 349: n = A,T,C or G
ccctttcgagcggccgcccgggcaggtactttntttttttttttttttttttaaaaaaanancntttncntttttnccccgggcngnntnaaannncngggcntaaannanttnncccccntaanccnccaaaagggggggantnnnnggngnnnnccncnttccnnggncaaaaancngnttttaangncccncccaaaanggntttccagggggaaatttnnntacccngntaattttaaaannnaaatttcngngnaaaanngacccnaantttgtgnggttttccnnncccntttttnaaannnntnntnntgtataaannncnnaaaaaaataatnnntttnanaaaaaaaaa

SEQ ID NO: 994 - DNA, 307 bp, Homo sapiens
  misc_feature 4, 9, 19, 23, 28, 33, 34, 41, 42, 43, 44, 45, 48, 50, 58,59, 63, 64, 67, 68, 76, 77, 79, 80, 81, 82, 83, 84, 86,92, 93, 96, 106, 107, 108, 112, 113, 117, 122, 127, 128,129, 136, 137, 142, 157, 159, 166, 171, 174, 184, 191, 193: n = A,T,C or G
  misc_feature 196: n = A,T,C or G
actntattntttttttttnaatnaagtntggannaaaaaannnnnggntngtgacaannggannttnnaccccccnnannnnnncnaggctnnggncctggaagcnnntganntttnacacngaaannncccccannaaacnggggaccaccccctncnccatggngtgtnttncccaaaacanctttaantnggnagggaaaataagaaaaggggaggtttggggaaaaagtcatccccagtcttgaatccctgtggccagtgaataagatatacgtccagatagctcaacttcaggtccttgagg

SEQ ID NO: 995 - DNA, 456 bp, Homo sapiens
  misc_feature 7, 9, 10, 11, 16, 17, 18, 30, 36, 41, 45, 49, 54, 55, 57,58, 65, 67, 68, 69, 77, 87, 89, 96, 99, 101, 102, 110, 113,119, 123, 124, 130, 131, 139, 147, 148, 152, 154, 157, 162,165, 167, 183, 186, 188, 192, 204, 213, 214, 228, 230: n = A,T,C or G
  misc_feature 232, 234, 250, 251, 253, 254, 258, 261, 267, 289, 295, 308,314, 315, 335, 343, 347, 358, 364, 366, 368, 372, 385, 444: n = A,T,C or G
cccttancnnnggccnnnccgacgtgcacnggagcnggganccgntcanatacnntnncacaccncnnnaactttgngcttaccctntngacaaanaancnngctgctgntgnctcttngggnncacacnncctttaanagctacanngatnancangacanggngnggcttcattcttgaantcngngacnccacaaacccancccaagggnnaaactccgcacccntntnanagaacaaactccaaanncnncatnttntacagntgtaacacacactgtgaaagtncacggnttcattcttgaanccagcnngaccacaaaccctttggaangaaccagntctngacacagcaangacgtnananttcnacctgctcactcngaatgattttcgtaccaaccatggccacctttgtggagctcagtacctgcccgggcggncgctttaaaggg

SEQ ID NO: 996 - DNA, 190 bp, Homo sapiens
  misc_feature 4, 11, 12, 14, 15, 17, 22, 24, 30, 34, 39, 40, 45, 61, 67,87, 88, 90, 99, 108, 109, 115, 122, 124, 130, 134, 135,140, 142, 148, 158, 166, 171, 176, 177: n = A,T,C or G
cgtnccctganntnnanaaacntngccatngttngtgcnnaaatnatttttatttatcatntagaanccacacaaaaattttttttnngngtttttttnttccagaannaaaggntctcacntncttggngaannaaaananccaccntcacagtgtntgttacantttgntaacnnatggggggggggg

SEQ ID NO: 997 - DNA, 406 bp, Homo sapiens
  misc_feature 33, 34, 40, 42, 44, 50, 57, 76, 77, 79, 80, 83, 84, 85, 93,94, 95, 97, 101, 105, 109, 110, 111, 115, 118, 119, 122,125, 126, 127, 137, 145, 156, 159, 164, 167, 168, 173, 185,191, 193, 196, 204, 207, 212, 220, 255, 259, 289, 295: n = A,T,C or G
  misc_feature 299, 303, 305, 306, 319, 322, 325, 333, 337, 343, 356: n = A,T,C or G
ccctttcgagcggccgcccgggcaggtacccgnncttggngntnagggtngagaacntatgaacattgtgtggggnngnntgnnntatggacnnngntacnttcntgcnnncaangcnncantannntgtctcatanccacactnctacttggganccnttacnganncctgnaaagcggattgntttccngnccnggcgggantgnaaacnaccactgnctccaaacaaagcatcaacagctacctggggatgngganaactctggttggcgaatttcacgaactggnggaggntcantggncnntcacgaacaacanacntgntactggtnggcnttgttnttggtccattctnctgggaccaccaccctggaaggacacttgagccctactcaaggacccacc

SEQ ID NO: 998 - DNA, 310 bp, Homo sapiens
  misc_feature 51, 56, 57, 58, 59, 60, 61, 64, 65, 68, 69, 70, 71, 72, 77,81, 83, 84, 85, 86, 87, 90, 91, 93, 98, 99, 105, 115, 116,118, 120, 124, 125, 127, 128, 129, 156, 166, 167, 168, 169,175, 186, 190, 206, 214, 220, 221, 222, 225, 236, 238: n = A,T,C or G
  misc_feature 247, 252, 254, 256, 260, 263, 274, 275, 276, 277, 278, 280,285, 286, 287, 288, 292, 298, 310: n = A,T,C or G
ccctttcgagcggccgcccgggcaggtactttttttttttttttttttttnggggnnnnnnttnnccnnnnnggggnaaantnnnnnaannanaaccnnaacccnaaggggaaannangnaaanntnnncccctttttttttttttttgggggggnttcccccccnnnntttttnggggaaaaaancccncccaaaaaaaaatttnaaaaattncctttnnnccnaaatttttttntnccctttttnccccnanantttnaangggggggtttnnnnnanggggnnnnaaantttttnaaaaaaaaaaan

SEQ ID NO: 999 - DNA, 128 bp, Homo sapiens
cccttagcgtggtcgcggccgaggtactgagctccacaaacgtggccatggttggtgcggaaatgattctgagtgagcaggtagaagtctcacgtcctgctgtgtccagagttggttccttccagagg

SEQ ID NO: 1000 - DNA, 818 bp, Homo sapiens
  misc_feature 339, 340, 349, 351, 371, 374, 383, 385, 394, 423, 427, 430,451, 452, 455, 463, 464, 483, 486, 493, 498, 499, 508, 514,516, 519, 522, 529, 541, 542, 547, 548, 551, 552, 557, 563,566, 569, 571, 573, 575, 582, 595, 598, 600, 606, 608: n = A,T,C or G
  misc_feature 610, 611, 616, 622, 624, 637, 641, 658, 666, 667, 672, 674,678, 679, 685, 686, 687, 688, 689, 692, 695, 710, 714, 720,722, 723, 731, 734, 736, 738, 739, 740, 741, 742, 743, 744,745, 746, 747, 748, 749, 750, 752, 753, 754, 755, 756: n = A,T,C or G
  misc_feature 758, 759, 763, 764, 770, 772, 777, 782, 783, 787, 790, 793,794, 799, 804, 805, 807: n = A,T,C or G
cccttagcgtggtcgcggccgaggtacaggtatgccctggctgcctccacacttccacccactcccagggagaccaaaagccttcttacatctcaaggtagggacaaaaatggggaccatgatggctgattattcaaaataaaacaaaaagtattaaggtgaagattttttaaaatgctgcattacataatttacatgaaagcaatcctgtaacctcccctttgtggactcaggagagaactgggccgttctcctgagagaagtggggtggcttttgggagggcaagggacttcctgtaacaatgcatctcacaatatgtggaatgactattttaaagnntaaccttgnanagtacctgcccgggcggccnctngaaagggcnanttccagcanactggcggccgttacttagtgggatccgngctnggnaccaaccttggcgtaaataannggnaatagctnntttcctggggggaaatttnttntcccccncaaanntttcccccncaaaananccnaanccggaantttttaaaaggnnaaaannccnnggggncccctnaanggngngncnctaaccnccaaattaaattnggntnggcccncncnngcccntttttnangggggaaaaaccncggngggcccccttttaatanaaaaaaannctccncncccnngggggnnnnnggnggnaagttttttgtgggntttncccccnanntttttttnttntntnnnnnnnnnnnnngnnnnntnngggnngggggnanagggnttttnntttnttntannggggnttttnnanaaaaaaaaaaa

SEQ ID NO: 1001 - DNA, 411 bp, Homo sapiens
  misc_feature 32, 46, 71, 74, 89, 125, 135, 151, 154, 171, 181, 203, 206,216, 222, 239, 244, 254, 262, 265, 279, 281, 288, 291, 305,313, 329, 338, 341, 357, 365, 373, 379: n = A,T,C or G
aggtacgcgggggggatctcaggaggcagctntctcggaatatctncaccatggcctgggctctgctcctnctnaccctcctcactcanggcacaggatcctgggctcagtctgccctgacttangcttcctccntgtgcctggatctgantgngacagttcagcgcactnatatttcggngctcattggggacgcagtcagntgnacactcaggntcagtntagtacaccagacgtgntctangagttacctngcccatgnccnggttctgtttactnancaactanatnacatcctccgcgtngcctgccngggaaatatccgatantggaaaacnagntttcatacgcggtacnctgtcccngggtgggngccccngtacccaagcttttttgttccccttttaaggt

SEQ ID NO: 1002 - DNA, 535 bp, Homo sapiens
  misc_feature 14, 17, 20, 23, 27, 28, 29, 31, 35, 38, 67, 68, 74, 75, 77,79, 92, 95, 98, 149, 158, 168, 185, 187, 202, 220, 267,272, 273, 284, 292, 302, 304, 308, 321, 327, 330, 354, 360,362, 372, 373, 391, 392, 407, 425, 426, 446, 459, 464: n = A,T,C or G
  misc_feature 480, 504, 512, 520, 526, 528: n = A,T,C or G
ccgggcaggtaccngtnttnatntctnnntngatnacntccggggatacaatactatccatactccnngccganntngntatttgaacatgntanggntgcctcacctgcctagcgggttggatttcccataccgggcttggctccctnatgggcctncctgttcccnatcagagggatctaccntntgcccagaggcagtnacaggccaagggaagcangcagggcttgatatgaagcctccctctcaaccactgtggtctcagcnactgnncccgctgaggnatcttcanttatgggggnantttntgggaaaacgagnaggganccnccttattttattattcacatgtcnattttntntgattcactnntaagcaaaaagttcgagnntataccaagtgttcnttaaaaaaaagtaaaagnngctgtttgggatgctcgagngggtgcttggcangaaanacaactggggaatccnaatactttaataatggacaaagcngtggcgtngcccttcnaaaggngnggggggc

SEQ ID NO: 1003 - DNA, 503 bp, Homo sapiens
  misc_feature 1, 32, 34, 114, 159, 162, 221, 228, 246, 343, 368, 385, 444,446, 476: n = A,T,C or G
nttttttttttttttttttttttttttttagnanagacggggtttcaccgtgttgcccaggctggtctcgaactcctgagctcaggcaatctgcccgcctcagcctcccaaagngctaggactacaggcttgagccacagcacccggctgacacttttnttnttggagcctcaagcaaccaggctcctcctgccagcctttaccctcctgggatgttctanaggacanagccaggtgacagccttntgtgggggagcaaggatcaaggccttgcttgaaagggtgaaagggtgtgtctccccttacttctgggccttcacacacacctcctttgcctcgcgtnttcaccctgccgacttaaggggcanagccagactttaactanaaagccatattctcaataactatgcaaggaggaatgccctccttgagggcttgagccanancctttcattggggtagtcacgacagcaaanctattacctttccctttttatttggcc

SEQ ID NO: 1004 - DNA, 470 bp, Homo sapiens
  misc_feature 65, 66, 67, 68, 69, 70, 71, 72, 73, 89, 95, 96, 97, 101,108, 109, 110, 112, 115, 116, 117, 118, 120, 123, 124, 125,148, 151, 152, 153, 155, 159, 176, 186, 189, 192, 193, 199,201, 207, 208, 212, 219, 220, 223, 224, 225, 229, 230: n = A,T,C or G
  misc_feature 233, 234, 237, 240, 241, 245, 249, 263, 264, 273, 275, 280,281, 286, 291, 306, 312, 316, 318, 321, 322, 323, 336, 337,338, 340, 341, 343, 344, 352, 365, 369, 370, 375, 381, 384,385, 388, 389, 390, 391, 400, 405, 413, 415, 418, 421: n = A,T,C or G
  misc_feature 425, 428, 434, 435, 438, 440, 446, 450, 451, 454, 455, 456: n = A,T,C or G
tgagggcgaattggagctccccgcggtggcggccgaggtactttttttttttttttttttttttnnnnnnnnncccccccggggggggngggggnnntttnccccccnnncnccnnnntnggnnnggggacccctttttaaggccccnttnnngnaaanaacccctttttcccccncccccggggnccncanngggggncngggaanncccnttaaaannttnnngggnnaannttnaanngggntttnccccccccccggtnnttttaaaancnaaaannttttnggggnaaaatttttaaaaanaaaaangggnanttnnntttttttaaaaannncnntnntttttttnaaaaaaaaaaaantttnnggggnttcccnggnnttnnnncaaaaaccntaggnaaaaaaangnccnttngccnccnaagggnngcnanaaaaangggnnggnnngggtaaaaaaaaaa

SEQ ID NO: 1005 - DNA, 378 bp, Homo sapiens
  misc_feature 119, 123, 133, 139, 140, 149, 151, 153, 157, 158, 160, 175,180, 183, 187, 195, 199, 207, 230, 232, 233, 239, 240, 255,259, 263, 265, 266, 267, 271, 273, 278, 279, 289, 290, 293,294, 302, 304, 307, 311, 316, 320, 321, 322, 325, 332: n = A,T,C or G
  misc_feature 335, 339, 341, 343, 349, 351, 353, 358, 361, 365: n = A,T,C or G
gggcgaattggagctccccgcggtggcggccgagtacttttttttttttttttttttttttttttttttttttttttttttttttttttttttttttttttttttttttttttgggccntttnttttactttntttaannttccccccncnanaacnncnccttttttttaaacnaaaanccntccngggttccngaanggggggcnaaaaaaaaaggaaaagtcaaaancnnccggannggggggggggggaanaaanaaancnnnttgncngggcnnttaaaattgnnggnngcttggancnccncctngttgncccnnnganttaaccnaanaaancncncccccnantnaaaanggncttnccccccccccccc

SEQ ID NO: 1006 - DNA, 180 bp, Homo sapiens
  misc_feature 40, 41, 46, 49, 58, 59, 63, 64, 65, 66, 68, 69, 71, 72, 81,84, 90, 93, 97, 99, 104, 105, 107, 110, 117, 122, 131, 135,141, 142, 143, 146, 147, 148, 151, 152, 153, 154, 160, 164,165, 166, 168, 171, 179: n = A,T,C or G
aggtacttttttttttttttttttttttggggggtttttnnttttnttnaaacctttnnaaannnnanngnnaaaaaaaantcntttccnggntttncnaaaannanttngggtttngggcntgaaatttnaaancccccnnnggnnnaannnnccgggnaaannntnccntttttttnc

SEQ ID NO: 1007 - DNA, 573 bp, Homo sapiens
  misc_feature 512, 523, 558: n = A,T,C or G
ccgggcaggtacaaatcaatctaaaagaggtcaacatcccaaaagcaaatgggcaacaaatatgaacaattcacagaaaatgccaagctcctgatgctgaccctccctcataagaaaactgctaataaaaactcctggagaggatgctcacaccaccctgggagggaacacagtggtctctggaggaaggcacagcatatgctttcgagttaccaaggcacacagcattgtaggccaggcatctggcctacaggatactcacccagtctttacggagcaactgtaaaaaacaacaactgtttacaattagcatagtatcacctggaatctacttacatatcgatcctctcatttcaagagaagaacttctccaatgcacgtcctaccatactgtggaaactgggaactcattctgcatctagttgggataggagattaatttctaaacccacagcccttattctgcccacaccctgcccctgatctacccaaagcatttgcaaagtgatgangaggcagcctnctgggatagaaacttttgaagaaaaaggccagttncagatgggctgggaa

SEQ ID NO: 1008 - DNA, 566 bp, Homo sapiens
  misc_feature 110, 114, 122, 129, 132, 134, 143, 149, 151, 156, 158, 159,161, 163, 164, 168, 179, 180, 182, 189, 192, 194, 208, 211,212, 220, 226, 228, 229, 234, 242, 245, 250, 251, 256, 259,260, 269, 283, 289, 294, 300, 301, 302, 304, 310, 312: n = A,T,C or G
  misc_feature 320, 324, 327, 329, 330, 332, 334, 337, 348, 353, 362, 368,375, 381, 385, 389, 403, 411, 414, 417, 418, 424, 427, 428,430, 431, 440, 454, 462, 465, 467, 468, 469, 485, 486, 488,495, 498, 513, 518, 519, 521, 524, 525, 527, 530, 533: n = A,T,C or G
  misc_feature 547, 549, 550: n = A,T,C or G
ggagctccccgcggtggcggccgcccgggcaggtactttttttttttttttttttttttttccttttttttttttttttttttttttttttttttttttttttttttttngccntcaatttnttaaaanaancntgtttagcnggtttnancaatngnntngnngttnggggtaaaaanncntaaaaanganangggggggttggcancannccgaagtnggtttntnnccatnccctgcanttntgggnnccaanggnnttgcaaaangttaaaataaatcncaaagncgggnggcatnnntnaatggnanaaaccccncaanatngnntnanagnttcatcccgtnggggnaaaaaaaanattccntcaattnatttangggntttnggagggggccttgncgttctanganccnnttgaanaanntnntttgttttnaagccctttaaacncttggggnttngnnncgggctttggaaaaanncnctttttnccnaaaagggggggcggnacccnnanccnncngtnaanactttgtttggggngnngggggccccccccccc

SEQ ID NO: 1009 - DNA, 697 bp, Homo sapiens
  misc_feature 523, 536, 543, 571, 598, 605, 607, 626, 650, 656, 690: n = A,T,C or G
aggtacaaaagccaagatgcccattgtgggcctgggcacttggaggtctcttctcggcaaagtgaaagaagcggtgaaggtggccattgatgcagaatatcgccacattgactgtgcctatttctatgagaatcaacatgaggtgggagaagccatccaagagaagatccaagagaaggctgtgatgcgggaggacctgttcatcgtcagcaaggtgtggcccactttctttgagagaccccttgtgaggaaagcctttgagaagaccctcaaggacctgaagctgagctatctggacgtctatcttattcactggccacagggattcaagactggggatgactttttccccaaagatgataaaggtaatatgatcagtggaaaaggaacgttcttggatgcctgggaggccatggaggagctggtggacgaggggctggtgaaagcccttggggtctcaaatttcaaccactttcaagatccgagaggctttttgaaccaaacctgggctggaatttaaccnagtgacttaaccnaggttgnagtgtcacccattaccttaccccagganaaaactgatcccagttcccttgccccnggccggntnttaagaactaagtgggatnccccccgggcttgcagggaattcnatatcnaagcctttattcgataccccttcgaccctccaanggggggg

SEQ ID NO: 1010 - DNA, 131 bp, Homo sapiens
  misc_feature 72, 75, 84, 99, 120: n = A,T,C or G
tttttaaggattcaagaggtgatctggcttttgtgaaagtgtacgcggggacggcttctgctggcggccgcnganacgcaaagncttgagcagcgcggnaggcaccatgttcctgactgngctcctctggc

SEQ ID NO: 1011 - DNA, 648 bp, Homo sapiens
  misc_feature 1, 14, 32, 38, 39, 47, 49, 50, 56, 62, 68, 70, 77, 80, 87,89, 91, 93, 96, 99, 100, 102, 104, 106, 114, 120, 129, 135,140, 145, 146, 164, 167, 180, 187, 189, 195, 200, 213, 216,220, 234, 238, 242, 245, 246, 251, 253, 265, 268, 271: n = A,T,C or G
  misc_feature 279, 282, 285, 291, 317, 323, 324, 330, 332, 335, 349, 351,374, 375, 395, 404, 408, 439, 447, 455, 461, 469, 481, 497,500, 506, 510, 548, 549, 559, 571, 574, 610, 627, 638: n = A,T,C or G
natccagatacttntgcctgccttgaagtganggcctnncaccaaangnnccatgngcaccntgctgncnatgaacnggnactcccncntnanagnctnntntngnatcttatnttgganggcttatcncacctnatgtngatgnncatagaattaggcacagngantggggcgatattntggatananggccancttgnccggttttttcanttngccnagaagagactgaantgcncaanacnngcccntnacacatgtattnttnttntaagaganganacnttgccntgttgcccaggctggactaacactgncaggtnnaaacantnctncgaactcctgaggnanctggaattacaccacactgagcnncaccatattggtcttatccncagaccacnttgncctgccccacacagtccagtttatccaaacnaaggcttnctgggggncttctntttgccanggaatatctggnaggatacacagtgtanaanaatttntcanaccaaaaggaaggaaaagcgaatttaattttatggatnntgcccctttngccctatgctanctnaaaaggtcaaattgccctttttcattcaagggttanttcctgaaaatggtccntccagggtggngggggggggg

SEQ ID NO: 1012 - DNA, 745 bp, Homo sapiens
  misc_feature 401, 449, 487, 504, 559, 577, 605, 621, 629, 640, 642, 651,652, 658, 660, 676, 677, 693, 696, 700, 706, 709, 723: n = A,T,C or G
ccgggcaggtacaaaagccaagatgcccattgtgggcctgggcacttggaggtctcttctcggcaaagtgaaagaagcggtgaaggtggccattgatgcagaatatcgccacattgactgtgcctatttctatgagaatcaacatgaggtgggagaagccatccaagagaagatccaagagaaggctgtgatgcggggggacctgttcatcgtcagcaaggtgtggcccactttctttgagagaccccttgtgaggaaagcctttgagaagaccctcaaggacctgaagctgagctatctggacgtctatcttattcactggccacagggattcaagactggggatgactttttccccaaagatgataaaggtaatatgatcagtggaaaaggaacgttcnttggatgcctgggaggccatggaggagctggtggaccgaaggggcttngtgaaagcccttggggtctcaaattttcaacccacttncagatcggagaggcttntttgaaacaaaccttggacctgaaaaatattaaacccaggtggaccttaaacccngggtttggagttgttcanccccattaccctttaaccgccagggaanaaaaactggattccantaaccctncggcccgcttntnagaaaactnngtgggnantcccccccgggcctgnnaaggaaattttcgatnttncaancctttnttnggataccccgtccnaacccttcgaaggggggggggc

SEQ ID NO: 1013 - DNA, 767 bp, Homo sapiens
  misc_feature 360, 383, 401, 409, 411, 412, 414, 416, 446, 450, 458, 473,474, 476, 484, 490, 494, 501, 514, 522, 532, 541, 543, 544,555, 558, 562, 579, 582, 583, 595, 596, 600, 607, 615, 622,626, 633, 634, 639, 640, 644, 645, 646, 647, 658, 662: n = A,T,C or G
  misc_feature 664, 689, 703, 715, 720, 730, 744, 745, 752, 756: n = A,T,C or G
ccaagatgcccattgtgggcctgggcacttggaggtctcttctcggcaaagtgaaagaagcggtgaaggtggccattgatgcagaatatcgccacattgactgtgcctatttctatgagaatcaacatgaggtgggagaagccatccaagagaagatccaagagaaggctgtgatgcgggaggacctgttcatcgtcagcaaggtgtggcccactttctttgagaggccccttgtgaggaaagcctttgagaagaccctcaaggacctgaggctgagctatctggacgtctatcttattcactggccacagggattcaagactggggatgactttttccccaaagatgataaaggtaatntgatcagtggaaaaggaacgttnttggatgcccggaaggcnttggaagnanntntnggccaagggcttgttaaaaccctttggggntttnaaattttnaccccttttccaaanncngaaagggnttttgnaaanaaacccnggactgaaaattnaaccccgngggccttaancccgtttgngnngtgtccccttntcncttnaccccgggggaaaaacngtnntccccagctttnncccnccccaangggggttnttacccntttngggggtnnaaaanncccnnnnggggtttttcncgananaaaaactttggggcccaaaaccttnggggacccctttcnctttggtggggngggancccccaaaanttaaggggaaattnntttggcnaaanccccaaaaaaa

SEQ ID NO: 1014 - DNA, 276 bp, Homo sapiens
  misc_feature 25, 26, 34, 36, 44, 51, 84, 86, 90, 92, 93, 97, 98, 99, 101,104, 106, 109, 110, 111, 113, 114, 128, 130, 131, 138, 139,141, 146, 148, 149, 151, 154, 155, 157, 161, 165, 171, 173,177, 190, 204, 211, 220, 222, 223, 235, 239, 250: n = A,T,C or G
  misc_feature 251, 260, 261: n = A,T,C or G
cgctcattgaggatcttcatgaggnngtacggtnangttccggncagccangtccagacgcatgatggcgtgggggagggcgtncncctngnngatnnncnccntntgnnntnnccaatattgagaananntctcccnncntgganannanccnnangctnatanggacantncggnctgaatggccacntaccttggtctttntaaaacnatggggatncnnaagtctgtaatnaatnaagatctcacnntaatatatnntcgctgacctcttac

SEQ ID NO: 1015 - DNA, 408 bp, Homo sapiens
  misc_feature 385: n = A,T,C or G
tggagctccccgcggtggcggcccgaggtacaaaagccaagatgcccattgtgggcctgggcacttggaggtctcttctcggcaaagtgaaagaagcggtgaaggtggccattgatgcagaatatcgccacattgactgtgcctatttctatgagaatcaacatgaggtgggagaagccatccaagagaagatccaagagaaggctgtgatgcgggaggacctgttcatcgtcagcaaggtgtggcccactttctttgagagaccccttgtgaggaaagcctttgagaagaccctcaaggacctgaagctgagctatctggacgtctatcttattcactgccacagggattcaaggtttgagtgactccctttctcagcctctantttctgagctgttgcaggaattc

SEQ ID NO: 1016 - DNA, 219 bp, Homo sapiens
  misc_feature 37, 39, 41, 42, 49, 50, 60, 63, 66, 67, 73, 74, 76, 77, 80,82, 83, 86, 89, 90, 99, 105, 109, 110, 111, 120, 124, 128,134, 136, 142, 143, 147, 148, 152, 153, 154, 157, 158, 161,165, 166, 167, 173, 174, 175, 178, 184, 185, 194, 206: n = A,T,C or G
  misc_feature 207, 210: n = A,T,C or G
aggtacttttttttttttttttggtttttttggaaanancnncccgggnngggaaggggnaanttnncccccnngnnccntnnttngannggggaaccntttttnaagnnnccttttcgnaaanaaanccttantncccctnncccnngggnnncannggngggnnnggaaannncantaaaannttaatgggnaaaactttaaannggnttttccccc

SEQ ID NO: 1017 - DNA, 253 bp, Homo sapiens
  misc_feature 15, 18, 22, 23, 34, 37, 41, 42, 45, 47, 51, 64, 66, 67, 69,71, 72, 73, 76, 83, 87, 88, 95, 98, 100, 104, 118, 127,141, 147, 149, 164, 168, 175, 181, 188, 197, 198, 202, 203,225, 229, 246: n = A,T,C or G
gtgtttctggtaaancanacanngctccggggantangcanntananacanaaaaacaaaaagncnnangnnnganaaaaaanaaannttaaggntanantaanactaaaaaaaaaanattgggganctccccctgtaacntgaaananaaaatgaatgcgggncgtnccccgtnaactcncacattncaactaatnntggnnacgaaaaatcacattgaacccngganacggacgtttcattganccgaaat

SEQ ID NO: 1018 - DNA, 834 bp, Homo sapiens
  misc_feature 417, 419, 420, 424, 425, 440, 447, 450, 458, 460, 483, 484,485, 486, 487, 488, 489, 491, 499, 501, 505, 514, 523, 541,543, 548, 567, 568, 570, 571, 572, 573, 581, 582, 583, 584,585, 586, 587, 592, 594, 602, 604, 608, 611, 619, 634: n = A,T,C or G
  misc_feature 635, 636, 638, 643, 645, 646, 647, 648, 649, 650, 651, 652,654, 669, 671, 675, 676, 679, 682, 685, 687, 689, 690, 704,708, 716, 718, 719, 722, 723, 725, 729, 730, 731, 732, 734,736, 737, 739, 741, 742, 743, 760, 763, 764, 774, 775: n = A,T,C or G
  misc_feature 777, 783, 786, 792, 795, 797, 798, 806, 808, 809, 811, 817,818, 820, 822, 823, 824, 825, 826: n = A,T,C or G
tcaagctggaggtcattacacctactctgagaatcgtgtggaaaaagacggcctgattcttacaagccgggggcctgggaccagcttcgagtttgcgcttgcaattgttgaagccctgaatggcaaggaggtggcggctcaagtgaaggctccacttgttcttaaagactagagcagcgaactgcgacgatcacttagagaaacaggccgttaggaatccattctcactgtgttcgctctaaacaaaacagtggtaggttaatgtgttcagaagtcgctgtccttactacttttgcggaagtatggaagtcacaactacacagagatttctcagcctacaaattgtgtctatacatttctaagccttgtttgcagaataaacagggcatttagcaaactaaaaaaaaaaaaaaaaantnnaaannaaaaaaaagggaaanaaaaaanaanaaaaaaangntagaaaaaaaaaaaaggaatttnnnnnnngngggggggncncctntttttttanaaaaaaaancccccccccccccccccngngaggnaaaaaaaaaaaaaaaaaannannnngggttgtnnnnnnntatgntntgggggcncncctnttngggggggnaaaaaaaaaaaaaannncnccccncnnnnnnnnanaaaaaaaaaaaaaantntttnnccnccnctntntnngggggggggggccncccnccccccananntgnntntttnnnnangnntntnnnccccccgcccccccccncannaaaaaaaaanntntctttnccnccttcnaanannaaaaaaananncncccccnngngnnnnngggggggg

SEQ ID NO: 1019 - DNA, 604 bp, Homo sapiens
  misc_feature 185, 196, 212, 214, 219, 221, 223, 229, 230, 231, 233, 235,237, 240, 242, 243, 247, 248, 249, 251, 252, 253, 255, 256,258, 262, 264, 269, 270, 272, 273, 279, 287, 288, 291, 295,296, 297, 298, 302, 305, 306, 308, 311, 317, 318, 326: n = A,T,C or G
  misc_feature 327, 330, 331, 344, 346, 348, 350, 354, 355, 358, 366, 373,381, 382, 389, 390, 391, 392, 393, 396, 397, 406, 410, 411,414, 424, 428, 430, 437, 444, 450, 452, 454, 470, 482, 485,486, 492, 494, 495, 499, 501, 504, 514, 515, 519, 525: n = A,T,C or G
  misc_feature 526, 527, 528, 533, 543, 544, 551, 552, 553, 554, 555, 556,557, 558, 560, 562, 563, 564, 565, 566, 567, 569, 570, 573,574, 578, 579, 580, 581, 582, 586, 587, 595, 597: n = A,T,C or G
gtcgacccacgcgtccgtccaggtcggtttctatctacttcaaattcctccctgtacgaaaggacaagagaaataaggcctacttcacaaagcgccttcccccgtaaatgatatcatctcaacttagtattatacccacacccacccaagaacagggtttaaaaaaaaaaaaaaaaaaaaggggnggccgttaaantattttaaaaaaaaancntcccncncntccccnnnancntnaanannaaannnannncnntngttntngtaanntnntttttngccctttnnatngggnnnnaaanaanncnttnccttcnnaattttcnnaannaaacctttttttncncngntttnnatngggggttngcccaanctcataanngtttttnnnnnggnngggaccccngggnnccnaccccaaatnaatncnttttccntttcctngttaantnantcgttgccctgggccnttcggttggggnaannggtttnanntccntnaangggggtattnngggnttcccnnnntttanaaaaaaaaannaactctnnnnnnnngngnnnnnnannaanngggnnnnncccnngggggggngngtttttt

SEQ ID NO: 1020 - DNA, 722 bp, Homo sapiens
  misc_feature 16, 23, 106, 108, 130, 149, 216, 243, 249, 268, 274, 281,288, 300, 306, 313, 315, 322, 331, 335, 337, 345, 352, 354,387, 414, 418, 421, 422, 427, 428, 429, 430, 434, 435, 436,442, 444, 453, 454, 455, 456, 462, 468, 482, 496, 498: n = A,T,C or G
  misc_feature 504, 508, 517, 520, 521, 523, 528, 530, 540, 541, 543, 545,548, 551, 563, 565, 570, 571, 581, 582, 583, 585, 586, 600,602, 619, 620, 623, 631, 634, 638, 639, 653, 655, 656, 673,677, 681, 682, 683, 684, 686, 692, 693, 694, 695, 696: n = A,T,C or G
  misc_feature 698, 700, 702, 717: n = A,T,C or G
ctccctgctatcattnggattcnttaaaaattaaatcatctcataagcttacaaatgttgatttttatttatttttttcatgataaaactttcatatttccatggngnatggaactataattttttatgngtttctttacgtgtaaggngagagtggcaagaacataaaaccttcacctgttagtcttagattttcttgggctggggaggggcagnagggctggaaccaatcactgatgggcncccagnccctggactgaaatttccngggaangcttaancaaactntgtggggggggncccttnagaaatngnccccccngcaaacacnaggncnccccgggngcccctnanaaaccccccctaaaaggcccccccaaaaggggnttttcttttttaaaaaaaccccccacngggnggnngcttnnnnaaannnaagggngnataaaaaannnncccccngggggnaaaaaaaaaaaaanaccccccccccccngngagggngggnggggggggnctnnancaaancncccccccggnnananaanaancccacccccccncncgccnngggggggggnnnanncccccccccccccncnaaaaaaaaaaaaaaaannccnaccccccnccncccnnaaaaaaaaaaaaananngcccccccccccccccncggnacannnnantaaaannnnntncncnccccccccccccccnccgcg

SEQ ID NO: 1021 - DNA, 618 bp, Homo sapiens
  misc_feature 2, 356, 427, 443, 450, 457, 472, 476, 490, 493, 505, 523,531, 541, 544, 549, 554, 559, 562, 583, 591: n = A,T,C or G
tncgggcaggttcgcgggggattaatgggttatcacaggaatgggactggtggctttataagaagaggaaaagagaactgagctagcatgcccagcccacagagagcctccactagagtgatgctaagtggaaatgtgaggtgcagctgccacagagggcccccaccagggaaatgtctagtgtctagtggatccaggccacaggagagagtgccttgtggagcgctgggagcaggacctgaccaccaccaggaccccagaactgtggagtcagttggcagcatgcagcgcccccttgggaaagctttaggcaccagcctgcaacccattcgagcagccacgtaggctgcacccancaaaagccacagggcccggggctacctgaggcctttgggggggcccaattccctgcttccaagtggttgtnccgtggagggcaagcnaccacgnaaagttnaaaaagtaagatttntttnttttttcccaccangantacctttttttnttcttccccattgacccnttttaacnagcaaatttnggntttcnatttnccccntcnaccttttcccaaggccttgantttttgangggaaaaacttttttaaagtaaaaaaa

SEQ ID NO: 1022 - DNA, 196 bp, Homo sapiens
  misc_feature 28, 41, 42, 49, 50, 51, 52, 53, 55, 56, 57, 58, 59, 61, 63,64, 65, 66, 67, 73, 79, 81, 83, 84, 86, 87, 89, 92, 93,96, 97, 100, 101, 102, 103, 106, 108, 110, 115, 116, 120,123, 126, 129, 136, 139, 140, 142, 143, 145, 149, 156, 161: n = A,T,C or G
  misc_feature 162, 163, 164, 165, 166, 169, 171, 176, 177, 183, 191: n = A,T,C or G
aggtactttttttttttttttttttttnaaaaaaaaatttnnttttttnnnnnannnnngntnnnnngggccntttttngncnnanntnaannttnnccnnnnggntnanccccnntttnaanccnaanccccccnaannanngnaaanaaaaaanccttnnnnnnggncnggttnntttttnggtttttnaaaaa

SEQ ID NO: 1023 - DNA, 346 bp, Homo sapiens
  misc_feature 16, 21, 28, 40, 47, 50, 54, 55, 56, 57, 59, 64, 70, 71, 72,79, 81, 85, 103, 104, 111, 113, 114, 129, 130, 131, 132,146, 157, 158, 181, 184, 185, 189, 190, 191, 199, 200, 203,205, 206, 210, 213, 214, 215, 216, 221, 225, 226, 230: n = A,T,C or G
  misc_feature 231, 243, 244, 249, 250, 251, 253, 254, 255, 257, 258, 261,265, 266, 268, 269, 285, 287, 291, 292, 300, 303, 324, 328: n = A,T,C or G
cggtggcggccgcccnggcangaacttntttttttttttntttgaanggnatannnntnttatngatacnnncgaactngngggngggccccgaacccgggtnnagggccntnnaatgagtgtttaatnnnngcgcttggcggtantcaaaaaatanntgttttctgaaaaaaaaaaaaanccnntccnnnaaaacccnnccngnnggcnttnnnnccggnaaannaaanntttggggggggnnttttnnngnnnanntgngggnncnnaacttttaaaaaaccntntttnngggggggnttntttttaaaaaaaggaaccccnttgnccttggggaaaaaaaaaa

SEQ ID NO: 1024 - DNA, 863 bp, Homo sapiens
  misc_feature 526, 545, 547, 549, 555, 573, 583, 593, 612, 613, 622, 656,657, 658, 669, 671, 674, 684, 685, 689, 693, 696, 706, 708,716, 718, 721, 722, 723, 726, 731, 735, 741, 744, 749, 752,754, 757, 761, 765, 766, 768, 779, 786, 787, 789, 790: n = A,T,C or G
  misc_feature 793, 795, 798, 799, 803, 807, 813, 815, 817, 829, 833, 846,848, 849, 863: n = A,T,C or G
acaaaagccaagatgcccattgtgggcctgggcacttggaggtctcttctcggcaaagtgaaagaagcggtgaaggtggccattgatgcagaatatcgccacattgactgtgcctatttctatgagaatcaacatgaggtgggagaagccatccaagagaagatccaagagaaggctgtgatgcgggaggacctgttcatcgtcagcaaggtgtggcccactttctttgagagaccccttgtgaggaaagcctttgagaagaccctcaaggacctgaagctgagctatctggacgtctatcttattcactggccacagggattcaagactggggatgactttttccccaaagatgataaaggtaatatgatcagtggagaaggaacgttcttggatgcctgggaggccatggaggaactggtggacgaggggctggtgaaagcccttggggtctcaaatttcaaccactttcccagatcgaagaggctctttgaacaaacctggactgaaatattaaaaccaagtngacttaacccaggttgagntntnacccantaccttaacgccaggaanaaaacttggntcccagttancctgcccccggggccggcnncgtttttangaaacttaggtgggaatcccccccgggccttctnnnaaatttccgananttnaaggcttttnngatnaccnggntaaccctttnangggggggncnccnnngtnccccnatcntttttnttnccttntancngangggntaanntnccccctttggnaaaaaanntnnggncnttnncttntttncctggngntnaaaattgttttntccntttaaaaatttgnanncccccccccccccn

SEQ ID NO: 1025 - DNA, 450 bp, Homo sapiens
  misc_feature 53, 54, 57, 62, 69, 75, 76, 97, 99, 125, 129, 160, 166, 168,223, 226, 229, 250, 253, 258, 278, 297, 308, 322, 339, 345,394, 419, 426, 429, 430: n = A,T,C or G
tttccctgcttttaaatatattattcattgacggtagaggaaaagaaaaggcnntgngcctncttgctnagtcanngcccagagcactgggcaaacnantttttcaccttttgcctggcgccaangaanggaaatgtttggcttttacatgacaatttgnttggtntnacggtgaaaaaaaccttttctttaggaaaaggaggccatttcttttgaggaaaantanaantttagaatttggggttataanttntttgnggttaataaaaattggttanggggggggtacaaaacaantattcttggtnctttcccaattttncctccaaccttattatnaattcnccacccccctttttttcccccttgtttccctttttaaaaaatttttaangaataaatttttggggaattttttnaaaaaangtnntttccttttttccttttttt

SEQ ID NO: 1026 - DNA, 331 bp, Homo sapiens
  misc_feature 32, 36, 37, 38, 41, 46, 47, 53, 54, 55, 56, 57, 58, 59, 60,61, 62, 63, 64, 69, 70, 80, 83, 87, 88, 94, 95, 96, 97,98, 99, 102, 103, 111, 112, 113, 114, 115, 116, 117, 118,119, 120, 121, 126, 130, 136, 137, 139, 142, 143, 144, 145: n = A,T,C or G
  misc_feature 150, 164, 168, 169, 170, 173, 179, 182, 183, 188, 189, 190,193, 198, 204, 208, 209, 214, 215, 227, 228, 235, 237, 238,239, 241, 242, 243, 249, 250, 252, 256, 257, 270, 271, 276,284, 285, 300, 301, 302, 308, 312, 313, 316: n = A,T,C or G
aggtactttttttttttttttttttttttaangggnnnggnttttnngggccnnnnnnnnnnnnggggnngggccccccnaangggnnccgggnnnnnnaanngttttttnnnnnnnnnnntgggncccnaaaaannanttnnnnttttnaaaaaaaaaaaaancccnnnccnaaaaanccnnccggnnngcnttttncccggnaaannaaaanntttggggggggnnttttttngnnnannngggggnncntaanntttaaaaaccccnnttccngggggggnntttttttaaaaaaannnaccccnttgnnccnttgggaaaaaaaaaa

SEQ ID NO: 1027 - DNA, 595 bp, Homo sapiens
  misc_feature 171, 182, 190, 208, 263, 264, 270, 272, 297, 324, 338, 372,379, 381, 382, 388, 401, 408, 409, 410, 411, 412, 421, 423,438, 442, 446, 454, 455, 457, 461, 476, 480, 481, 483, 488,489, 490, 497, 501, 506, 507, 509, 510, 517, 519, 541: n = A,T,C or G
  misc_feature 545, 547, 576, 577, 579, 581: n = A,T,C or G
ttgaacaagccggttgacgtccagttcaaggtaacgctcgccgcggcgcatggcctcggggttaccgaacaggaacagaatacgggtgcggggcttgatctcccacgggcaatgccttgcagcaagcggtcggccaattcgatcggcgcggtttcgttgccatggatgccngacgacagcancacgtcgntgcgttgtcccgcgcctnaagaggccgcacttcagcgcgccttacttgagccaagcgcagttgcacccccgtnnacagtnantttgaatttttttgcccccgttccncgaccgggcgaaggggttaatttcaanccatttttgcccgnggggcgaaacataaaaacaaattttttttttgtnggttgcnannccaaanaaccgggggacantaaatcnnnnntaaataaananttaaaaagggggggngttnttanaaaaaaannantggnccccccccggggggngggnngnaaatnnnaaatttntttnttttnncnnccccccntnggggggggggggggggggcccncccnanttttttttttttttttttaataaaaaaannangnccccccccccccaa

SEQ ID NO: 1028 - DNA, 371 bp, Homo sapiens
  misc_feature 11, 13, 14, 15, 18, 19, 25, 27, 28, 31, 34, 40, 46, 51, 55,56, 60, 63, 71, 77, 85, 92, 93, 98, 105, 110, 117, 124,141, 153, 160, 162, 184, 190, 218, 256, 259, 270, 276, 277,297, 304: n = A,T,C or G
aggtacccggngnnnccnncatggncnnggnctngaattncgcatnagcanctgnntatnganatacctangccggnagaggganaacacanntgganaaaatcngcagntgaaacngccttgnccggacttaacactcangcctgtgaatcnggaaatncnaagacctccaaaaaaggaccanttcctnggatgtgccccctcacagagagatgaangggcaccagaaaacatctgaaacggaagaggggacagngcntattcaagaangtgcannggctactggggaagacccanccagtgnggctattgccagcatccagtcatctgccaccttccctgaccccaacgtcgagtgatgtacctgcccg

SEQ ID NO: 1029 - DNA, 72 bp, Homo sapiens
  misc_feature 24, 29: n = A,T,C or G
gtatgcttgaaacaacaacagctntcatngaatattcagagagtccactaggtgccaggcaatgtctgaagc

SEQ ID NO: 1030 - DNA, 177 bp, Homo sapiens
  misc_feature 72: n = A,T,C or G
tgcagaattcgccctttcgagcggcccgcccgggaggctaagggaggctatgggaggctaagggaggctcangtaaggaggatctcttgagcctgggaggcagaagctgcagtgaaccaaaatggcaccactgcactccagcctgagtaacagagtaagactctgtctcaaaaaaag

SEQ ID NO: 1031 - DNA, 100 bp, Homo sapiens
  misc_feature 8, 25, 28, 31, 32, 33, 37, 50, 51, 54, 55, 56, 58, 60, 61,62, 63, 67, 76, 83, 89, 91, 93: n = A,T,C or G
acttaaantttttttttttttttcnttntgnnngggnaaaaaattttttnnttnnnancnnnntttntttgggccnttttaanggggcnantnttttttt

SEQ ID NO: 1032 - DNA, 178 bp, Homo sapiens
  misc_feature 53, 60, 65, 66, 67, 72, 74, 75, 76, 82, 83, 84, 86, 91, 92,100, 105, 109, 110, 111, 116, 117, 118, 124, 125, 126, 132,133, 134, 135, 137, 139, 140, 142, 144, 147, 148, 149, 150,151, 152, 160, 161, 162, 164, 165: n = A,T,C or G
ccctttcgagcggccgcccgggcaggtactttttttttttttttttttttttnggggaanggttnnnagggncnnnaaaacnnngnggggnngggccccnaaaangggnnnggggnnnaaaaannntttttnnnnananntntnggnnnnnnaaaaaaannntnnttttttaaaaaaa

SEQ ID NO: 1033 - DNA, 20 bp, Homo sapiens
  misc_feature 13: n = A,T,C or G
tggatatctgcanaattcgc

SEQ ID NO: 1034 - DNA, 54 bp, Homo sapiens
  misc_feature 37, 39: n = A,T,C or G
ccctttcgagcggccgcccgggcaggtacgcgggatncncacatgatcacacac

SEQ ID NO: 1035 - DNA, 55 bp, Homo sapiens
  misc_feature 7, 9, 10, 11, 17, 18, 25, 26, 29, 40: n = A,T,C or G
cccttancnnnggcccnnccgacgnncangagtgctcttntgcaggccacagggg

SEQ ID NO: 1036 - DNA, 54 bp, Homo sapiens
gggcgaattggagctccccgcggtggcggccgaggcactttttttttttttttt

SEQ ID NO: 1037 - DNA, 571 bp, Homo sapiens
  misc_feature 142, 218, 296, 364, 367, 430, 467, 487, 506, 507, 524, 538,558: n = A,T,C or G
tccccgcggtggcggccgaggtactttttttttttttttttttttttttttgagacagacttttgctcttattgcccaggttagagtacagtggcacgatctcagctcactgaaacctccgcctcccgggttcaagcaattntcctgcctcaacctcccaagtagctgggatacagttgcctgccaccacacccagctactttttgcatttttagtanaaatggggtttcaccatgttggccaggctggtcttgaattcctgaccccatgatccaccctccttggcctcccaaagngctgggattacaggcgtgagccactgagcctggccaatttttatttctgaaacatttattattaatgngangggaaaattacccagaatatatgttcatttcttataaagttaagtcttccaaaacctggtttnacaaaaaactgagggtaaattcagggctcaaatatanaaacttaaacttttcttggnaatccaattaaaaatgtanntcttagctgggccaggngggctcaccccctntaatcccagcactttggggnggccccggggggg

SEQ ID NO: 1038 - DNA, 22 bp, Homo sapiens
ttggagctccaccgcggtggcg

SEQ ID NO: 1039 - DNA, 152 bp, Homo sapiens
  misc_feature 32, 35, 36, 43, 49, 50, 51, 52, 53, 55, 59, 60, 61, 77, 79,85, 86, 92, 94, 95, 98, 99, 100, 107, 108, 109, 110, 111,112, 114, 115, 117, 123, 133, 134, 135, 136, 137, 138, 139,140, 141: n = A,T,C or G
acttttttttttttttttttttttttgggggnacnngtttttnggggcnnnnncngggnnnggggggggcccccccnangggggnnggggcntnnaannnttttttnnnnnncnntntggggncccaaaaaannnnnnnnntttttaaaaaa

SEQ ID NO: 1040 - DNA, 169 bp, Homo sapiens
  misc_feature 41, 42, 43, 50, 52, 56, 57, 58, 63, 64, 65, 66, 67, 68, 69,70, 72, 73, 75, 90, 91, 99, 105, 106, 107, 108, 109, 110,113, 114, 116, 121, 122, 123, 124, 125, 126, 128, 130, 131,132, 137, 138, 141, 148, 149, 151, 152, 153, 156, 157: n = A,T,C or G
  misc_feature 160, 161: n = A,T,C or G
ccgggcaggtactttttttttttttttttttttttttaaannnggggaangntttnnngggcnnnnnnnngnncngggggggggcccccnnaaaggggnccgggnnnnnnaanngnttttnnnnnncngnnntgggnnccnaaaaaannannnggnnttnnaaaaaaaa

SEQ ID NO: 1041 - DNA, 40 bp, Homo sapiens
  misc_feature 16: n = A,T,C or G
ggagctccaccgcggnggcggccgaggtactttttttttt

SEQ ID NO: 1042 - DNA, 44 bp, Homo sapiens
gattggagctccccgcggtggcggccgaggtacttttttttttt

SEQ ID NO: 1043 - DNA, 23 bp, Homo sapiens
agctccccgcggtggcggccgag

SEQ ID NO: 1044 - DNA, 44 bp, Homo sapiens
  misc_feature 4: n = A,T,C or G
ggcnaattggagctccccgcggtggcggccgaggtacttttttt

SEQ ID NO: 1045 - DNA, 290 bp, Homo sapiens
  misc_feature 207, 268: n = A,T,C or G
cggccgcccgggcaggtacagctactttggaggacagtgtggtggtctctcataatcctaaacatactcttagaatatgaaccagcaacactgctccccagtatttacacagatgggttgaaaacttctgcccacaaagaaatctgcacgtgcacgtttatggcagctttctttatcactgccaaaaacttggaaggaaccaagatntccttcaataaatgtcttactacattctggttgttgtaacaaaataccatacactgcgtanctgaggcaggaggatcacttga

SEQ ID NO: 1046 - DNA, 49 bp, Homo sapiens
ttggagctccccgcggtggcggccgaggtactttttttttttttttttt

SEQ ID NO: 1047 - DNA, 22 bp, Homo sapiens
tggagctccccgcggtggcggc

SEQ ID NO: 1048 - DNA, 149 bp, Homo sapiens
  misc_feature 29, 31, 33, 34, 40, 44, 48, 49, 50, 51, 52, 54, 56, 63, 79,80, 87, 88, 90, 91, 94, 95, 96, 104, 105, 112, 118, 130,132, 133, 134, 135, 137: n = A,T,C or G
actttttttttttttttttttaaggggtnangnnttaacnggcnatannnnnancngggggtnggcccccacaaagggnnccgggcnnannaannnttttttannaacaggnatgggnacaaaaaaatancnnnngnttttaaaaaaaa

SEQ ID NO: 1049 - DNA, 39 bp, Homo sapiens
ttggagctccccgcggtggcggccgaggtactttttttt

SEQ ID NO: 1050 - DNA, 149 bp, Homo sapiens
  misc_feature 68, 70, 74, 76, 87, 88, 89, 97, 98, 99, 100, 101, 104, 105,107, 117, 123, 127, 129, 130, 136, 137, 138, 142: n = A,T,C or G
taattggagctccccgcggtggcggccgcccgggcaggtacttttttttttttttttttttttttttnangggncnaaaaaaatttnnntggggggnnnnnggnncntttttttttnaaaaantttngnnccaaannnaaanttttaaa

SEQ ID NO: 1051 - DNA, 91 bp, Homo sapiens
acacattgaaatctgcaacatgctgggactgcagagagcctgggctgggagtcgtgagctccacccggctgtttttatgacagctggcaaa

SEQ ID NO: 1052 - DNA, 84 bp, Homo sapiens
  misc_feature 7, 9, 10, 11, 13, 15, 16, 26, 29, 46, 48, 63, 77: n = A,T,C or G
cccttancnnngncnnggccgacgtnctnagctccacaaacgtggncntggttggtgcggaantgattgtgagtgancaggtaa

SEQ ID NO: 1053 - DNA, 43 bp, Homo sapiens
cccttagcgtggtcgcggccgaggtactttttttttttttttt

SEQ ID NO: 1054 - DNA, 41 bp, Homo sapiens
ccctttcgagcggccgcccgggcaggtactttttttttttt

SEQ ID NO: 1055 - DNA, 177 bp, Homo sapiens
  misc_feature 31, 32, 33, 57, 58, 62, 64, 66, 71, 73, 82, 95, 104, 106,111, 123, 125, 146, 147, 152: n = A,T,C or G
tccccgcggtggcggccgaggtactttcatnnnttttacacctacctttttctgggnngggntntngaccncnatgatgtgngctctggaaggcntgagccaantnttttntaaactgactcnangagaacgctagggctacaaanngtctnctgaagatacaaaaccagcgtggct

SEQ ID NO: 1056 - DNA, 500 bp, Homo sapiens
  misc_feature 96, 240, 424, 447, 449, 487: n = A,T,C or G
gccgcccgggcaggtacagagctggaggcccaaacagccagccaaatcttgctgtattttatccaccatagtataatccagagactgtggaccccnaattgggatgcttttaaaatccaaagtagttctgtatacacatttgaagaaaaatgctgttgaagaaatgtatccataaaacacttcaggtcaaaaagcaaaagaatatcaagaaaaagtttaaataacatgattcctactggntttagatcataattatcatcctatattatttatattcggatcactggtatctttctctgacaaataattctgaaatacaatacattttaaagttatgcaggattttaaagacctcgtcttcaagcaaataccagaagtttaataacaaactttaaataaatgctcatttaaataaaagtttatntttctcctggccaaatatttggngnattcttacaaagatactttcaatgattagattccttancttaaaaaaaaaa

SEQ ID NO: 1057 - DNA, 385 bp, Homo sapiens
  misc_feature 265: n = A,T,C or G
cccttagcgtggtcgcggccgaggtacaggcggagggggcagaaactgacatcatggagtgtcaggcacggtgctggtgctatgcatacactcaacaagggcctgggtaatgcaacatggagaagggaaaactggggggcagaacaattttgtcgtctgaaagcctttcacagagaggccctgaacccatagctctccttctctgaggacagaaaaggaggaagtgtgtctgtcctgcagtatgtgggatggatagatggatgcnaaattaagcactgaagtgggttgcttggagaggcaatgactgcccctgccctcacctgaaaatccttaaagacagaagggatcatccgcccaggaagctgaggctgcaggataagctggc

SEQ ID NO: 1058 - DNA, 363 bp, Homo sapiens
ccctttcgagcggccgcccgggcaggtacaaccctaccactactctacatcatggaagtcttaacgatttagggtaatacgataatgagaataccaatatggatctattaaatgaggagctgagtaagctccaaatttccctctagattggtaagtctataatttattatatgaaattcctaattattaccatactaagttcaaaagattttaacccaaatcctttagtaactgataaacctcattcttaagattcttgacagaaataatcttgatgagcttcttctcttcatgatctttccaatgctgttataattttgagggaattactcttattttcattaattctgttgcaaggaggaa

SEQ ID NO: 1059 - DNA, 728 bp, Homo sapiens
  misc_feature 159, 237, 325, 351, 361, 418, 436, 450, 470, 476, 499, 526,528, 536, 539, 542, 554, 556, 560, 562, 577, 584, 589, 596,604, 608, 616, 619, 623, 630, 632, 634, 635, 643, 645, 647,652, 668, 673, 683, 688, 692, 693, 699, 700, 702, 703: n = A,T,C or G
  misc_feature 711, 724, 726: n = A,T,C or G
cccttagcgtggtcgcggccgaggtactccagctatcaaaggagaatagcctttaaaacaccaggatcctggtcgagatggtagaggtggtctgtttgaatttgggtgaatagaggaaatgccagttaagggatagccattctacagacaaaaatgcanccgtctatacttttactccgtggtaatacattatttgtatttcttctttcttaagcctcttgtctgtttgtcttaagnatttggcttatgtatttgtcacctacataaaatatgctcactaaaacgccactgactttaaggaattttaagtatgattatatgtggnccttgtagaaaaaccatctttaaagngtaaaaaaanaagtttttttaaaaagctaaattagaaaccaaaaaagatctgaaaactctggaatgnatacatatagaaatgggnttttttgaggaccntatgctcctctttgggatanaaatgngtcgaaaagagcaaatatcttgnaaaaatcaactaccaagaataccatcnangtaatgcnatntcnaagcccgttcantncaananaaaaaattttggagntaacccnagccngtggggncccatccnagantccctttnttntggnaacgggngnannaaaaattncnanaatgnctgtggcccccccggngtgtngtgggggggnctccngggnntggggnnannaccccccntgggaattttttntntt

SEQ ID NO: 1060 - DNA, 320 bp, Homo sapiens
actttgctacacggccgggggccattgagactgccatggaagacttgaaaggtcacgtagctgagacttctggagagaccattcaaggcttctggctcttgacaaagatagaccactggaacaatgagaaggagagaattctactggtcacagacaagactctcttgatctgcaaatacgacttcatcatgctgagttgtgtgcagctgcagcggattcctctgagcgctgtctatcgcatctgcctgggcaagttcaccttccctgggatgtccctggacaagagacaaggagaaggccttaggatctactgggggagt

SEQ ID NO: 1061 - DNA, 353 bp, Homo sapiens
  misc_feature 29, 125, 256: n = A,T,C or G
ggtacagtagaatctctctgaactgactntgacagatttttcttttttccccctatagaagtgccaagaatgagaaggctattttctaatatgcccacatgtgcatttgttgcatgtgtatgaanagggaagacagcttctttgcttagcaaaccactggttgtatgggatgtaaacccatgcttattaatgtaattacataatattacataaactgacaaaatatgaatgtgaaagctatttcaatgagactaantcaatgccaactaattaaaggttaagtttctaaaagaaaaaaaactcactcatattaggtatgtgtgacagttttaaaagattaaataataaaaata

SEQ ID NO: 1062 - DNA, 677 bp, Homo sapiens
  misc_feature 18, 61, 85, 89, 91, 396, 408, 430, 438, 441, 479, 495, 506,507, 519, 525, 551, 553, 556, 560, 571, 572, 584, 588, 605,609, 626, 644: n = A,T,C or G
gtcgacccacgcgtccgnttacatataatgcaacttatatgtaagtttcatcaacacagantgagtatataagttggctaaaagnaggnantacccatctaacagtacaatgctgtcagagacccaggctctttctggcttattgtaattcatttccttagcatgttgggttttatcttcattctgttcccttcacagttgtggaattcctgttgcagcttcattttttaaggacacaaggcaggaaaggggaagggcaactccacaccgtgtctgtcttcttatctttgaaattgcaaagctgtcccagttaccttaccaccctaccttgcttctctagcagatttctcttccataattatttaaagcccacctgggggtcactccagggtttancaaaagggttancggttatatttgaaaacctttngaaaattncancccctcccataagtaaaaagaaaggggccaagggggangaaaaacgggtgtttntggttttaagnncaaggtcgtaanattggntcaaaaagggaagaataagcccaagnantanttcntctttttttgnnggaggaataaanccangaccaccttgtttgcantttntaaaaaaccatggggtnattaaacctttggggccnttttaaaggggccattatttttcctttttaaaa

SEQ ID NO: 1063 - DNA, 465 bp, Homo sapiens
  misc_feature 23: n = A,T,C or G
cccttagcgtggtcgcggccgangtacccctttgctgtttgtccccctcctcccgggtcctggagtccgtcgtgttccaacagtttttgctcttattcccgtgggctgcctgggcctcctttcacccgtgagacttggagcggcccctggggtcttgggtgtgcagcacggatcacgcgagacccctgagacctcaaatcatctaacgtgaagccacagacatcttgggcaattttaatcatcaagaaagaaatatgtcattaagaaatagcagggtattttgaaagagttggaaaacatcatgaatttgaatacttcaagtaatactggtgatacccaaaggttgaagaatgcctcattggatgtaaaacaaatacttaaaaatgaaacagagttggatattactgataatctcaggaagaaactccattgggctaaaaaagaaaagttagaaataacaaccaa

SEQ ID NO: 1064 - DNA, 362 bp, Homo sapiens
ggtacccctttgctgtttgtccccctcctcccgggtcctggagtccgtcgtgttccaacagtttttgctcttattcccgtgggctgcctgggcctcctttcacccgtgagacttggagcggcccctggggtcttgggtgtgcagcacggatcacgcgagacccctgagacctcaaatcatctaacgtgaagccacagacatcttgggcaattttaatcatcaagaaagaaatatgtcattaaaaaatagcagggtattttgaaagagttggaaaacatcatgaatttgaatacttcaagtaatactggtgatacccaaaaggttgaagaatgcctcattggatgtaaaacaaatacttaaaa

SEQ ID NO: 1065 - DNA, 247 bp, Homo sapiens
  misc_feature 4: n = A,T,C or G
aganacttgaacaattggtttatttctaaaaagggtgacatttataagtattcatgcagcatttgagtccctattggtgagtgagcagactatccaatactcattggccctctggcacaacaaaattaaaacaaataaacaaaaatccgtgactacctagggttgctaggattgcttaagaagagtctaaagttctgttatacatgtgaacgcagaggacccacatgccgagctattgtttctttgg

SEQ ID NO: 1066 - DNA, 412 bp, Homo sapiens
  misc_feature 201, 203, 204, 307, 308, 311, 312, 319, 320, 348: n = A,T,C or G
tttgtcttccatccctaatccttgatcaatccaatcattcattttgtctcttcttacacagcctgtagaaagaaaaagactgcataacactgaagaagtgtggttacaaagttacgacttcctggctgggcgcagtagctcacgcctgtaatcccagcactttgggaggctgaggcaggcggatcacgaggtcaggagatngnnaccatcctggctaacggggtggaaccccgtctctactaaaaatacaaaaaattagctgggtgtggtggcgggtgcctgtggtcccagctacttgggaggctgnngcnngagaatnncgtgaaccggggaggcggagcttgcagngagccgagatcgtgccactgcactccagcctgggtgacagagcgagactctgtctcaaaaaaga

SEQ ID NO: 1067 - DNA, 466 bp, Homo sapiens
cccttagcgtggtcgcggccgaggtactccagctatcaaaggagaatagcctttaaaacaccaggatcctggtcgagatggtagaggtggtctgtttgaatttgggtgaatagaggaaatgccagttaagggatagccattctacagacaaaaatgcagccgtctatacttttactccgtggtaatacattatttgtatttcttctttcttaagcctcttgtctgtttgtcttaggtatttgtcttatgtatttgtcacctacataaaatatgctcactaaaacgccactgactttaaggaattttaagtatgattatatgtggtccttgtagaaaaaccatctttaaagtgtaaaaaaagaagtttttttaaaagctaaattagaaacaaaaaagatctgaaaactctggaatgtatacatatagaaatggttttttgaggaccatatgctcctctttgtaatac

SEQ ID NO: 1068 - DNA, 374 bp, Homo sapiens
cccttagcgtggtcgcggccgaggtactccagctatcaaaggagaatagcctttaaaacaccaggatcctggtcgagatggtagaggtggtctgtttgaatttgggtgaatagaggaaatgccagttaagggatagccattctacagacaaaaatgcagccgtctatacttttactccgtggtaatacattatttgtatttcttctttcttaagcctcttgtctgtttgtcttaggtatttgtcttatgtatttgtcacctacataaaatatgctcactaaaacgccactgactttaaggaattttaagtatgattatatgtggccttgtagaaaaaccatctttaaagtgtaaaaaaagaagtttttttaaaa

SEQ ID NO: 1069 - DNA, 288 bp, Homo sapiens
ggtactccctctcccctccctatctcaggaatgaagcttctgtgtctgctacaagcctccaatgccacaatgcaagctgttgagggggctcttcttcaacacctatgggcctgaaagattccagccacccaagatcttcagccctgaggttggaaactgacctgggggcctcagcttgctgtgactgtcactgcccatgtgttcttccccatgcctcaccttcctcctccaagtgcgtgaaacatcaatgaaccttgtgcttttgtcgtgtgatctgtacaccccatc

SEQ ID NO: 1070 - DNA, 274 bp, Homo sapiens
  misc_feature 23: n = A,T,C or G
cccttagcgtggtcgcggccgangtactaacatcaataagtcgagaaaattatattaactgaaagaaaacaaaataatagagaattttattaaacgtatttctaatgtttctcttcatgtttggagaaaagctgccacataattaaaacaattcttaccctgtaaaactgattgtcttccaatctcaggaggtttacattaacaggaatatagaataagaaacaggcctatggccgagctccgtggctcacgcctgtaatcccaacactttggg

SEQ ID NO: 1071 - DNA, 518 bp, Homo sapiens
  misc_feature 172, 194, 204, 206, 222, 248, 445: n = A,T,C or G
cccttgcactgtgacaagctgcacctgacgctcatcctgctccattattgcctgaccactaagctgaaaaacggtgtaaaaccaggcatcgtcgctgccttttacttcctgccaggtgcgggataaattcaccccgctggttgtcacggtactcagctttagtcctttggcnaaatgcgtgtccagtacacccntgtaacgctnantcagcaggcgtccggnaaaatttccgcatacctgattgattngggaaagccattgctgaaactcattatccactgcggggttcatggcacgttttcgctctgtgaaatgtatttttattgttgcatttgtgttgcaataaacgaagctaatgagcctgactataggaaataagtcttgtcaggcatagagacataagcggttattgtcacgatttgcggagcttgtcacagctgacaanagcgaatgtcacagcgaaaaaagtgacttttcttgtcgctgcgtacactgaaatcacactgggtaaataataa

SEQ ID NO: 1072 - DNA, 516 bp, Homo sapiens
cccttgcactgtgacaagctgcacctgacgctcatcctgctccattattgcctgaccactaagctgaaaaacggtgtaaaaccaggcatcgtcgctgccttttacttcctgccaggtgcgggataaattcaccccgctggttgtcacggtactcagctttagtcctttggcaaaatgcgtgtccagtacacccgtgtaacgctcagtcagcaggcgtccggtaaaatttccgcatacctgattgatttgggaaagccattgctgaaactcattatccactgcggggttcatggcacgttttcgctctgtggaatgtatttttattgttgcatttgtgttgcaataaacgaagctaatgagcctgactataggaaataagtcttgtcaggcatagagacataagcggttattgtcaccgaattgcggagcttgtcacagctgacaaagcgaatgtcacagcgaaaaaagtgactcttcttgtcgctgcgtacactgaaatcacactgggtaaataat

SEQ ID NO: 1073 - DNA, 235 bp, Homo sapiens
cccttgcactgtgacaagctgcacatccatatcgccatcaacaagattcacccgacccgaaacaccatccatgagccgtatcgggcctaccgcgccctcgctgacctctgcgcgacgctcgaacgggactacgggcttgagcgtgacaatcacgaaacgcggcagcgcgtttccgagaaccgcgcgaacgacatggagcggcacgcgggcgtggaaagcctggtcggctggatct

SEQ ID NO: 1074 - DNA, 346 bp, Homo sapiens
cacattctactctaccattcctttgcccattttaatttttttaagacacagatatccttaaaactttttatcagttcttcatcagatttaggatgcagttagatttttctctcactccatacaccaacaataattgtaaataaattagaaatttaaatgtaaagcaagaaatcatgtaagtcccagccaaaaatttgaataaatatgtaatctttgtgtgaagaaaactttttaaaaacagcaacaaagacagactattaaggaatgtaaactgaggaaaatatttgcaatatatggcaggcaaaaagttagtagatttaacatagaattttatttttgttaggat

SEQ ID NO: 1075 - DNA, 439 bp, Homo sapiens
  misc_feature 391: n = A,T,C or G
cccttgcactgtgacaagctgcacaacagagtgatttgattaacgtcgcccaactgacggcgcaatattatgtactgaaaccagaagcagggaatgcggagcacgcggtgaaattcggtacttccggtcaccgtggcagtgcagcgcgccacagctttaacgagccgcacattctggcgatcgctcaggcaattgctgaagaacgtgcgaaaaacggcatcactggcccttgctatgtgggtaaagatactcacgccctgtccgaacctgcattcatttcagttctggaagtgctggcagccgaacggcgttgatgtcattgtgcaggaaaacaatggctttaccccgacgcctgccatttccaatgccatcctggttcacaataaaaaangtggcccgctggcagacggtatcgtgattacaccgtcccataacccgc

SEQ ID NO: 1076 - DNA, 338 bp, Homo sapiens
acgcgggacacattcagaggtgagcccagagcgggtaaagtggactggggagaacttcggaggatgttcatgtccaggagcagccccacgccctgtatggtcggtgtctagagcctcacagcaactaagaccaacccagctctcagaagaaggaatgtcaaaatgtcatgttcaattttacattcagtgcctggaatcttttcttcacaattgaaatgaaatgtgctgaaggaggtgaatccatgcattaatcttcagctcacaaaggaaatactacataagaagcaagaccacagactcaagacggacataattggattttttttgccatggcctgg

SEQ ID NO: 1077 - DNA, 399 bp, Homo sapiens
  misc_feature 360: n = A,T,C or G
ccctttcgagcggccgcccgggcaggtacacacagttaaccacaaaacaggcctctctgaaaaagccattgccatggactgccagacagacaatgacaagacacagaataccttctggtgtgtgagccacgggacatgtgagcttccccgctgatgctcctcttatatcaaagatcactttcacaagatgagcgactcaatatcttttatcaaaccaatgatcacctgcaagctatggtatatttttgcagctgtgtagagctatgtggcatgagaatgtgggacttataaattgctgatccaataaatagacattatgggcaacagtgtcttatcagctagtgtgtactaaggtttcangaacagttgttctgaccttactatccaacgaggagtaac

SEQ ID NO: 1078 - DNA, 685 bp, Homo sapiens
  misc_feature 15, 30, 42, 44, 51, 93, 96, 122, 207, 235, 237, 242, 281,283, 287, 331, 342, 359, 412, 456, 462, 475, 478, 491, 492,508, 511, 537, 548, 554, 680: n = A,T,C or G
tttcggaggccgggntcggccctgtgtgcnatgtgttacccntntcaccanattaccattttgggccaagattctgaaaagcctactaaagcnacnacagtaggacccaaggaaataagccnatagttatgtaaaaaaggccttattgtaaaacaaacccattttttttaaggggagaagccttaggtattttaagcaagtttccanaaggacccccaaggccatgtttggaagngnaccanaagaaaggggcctttctttgtggtggaaccttggtcctngngggnggaattttttccaatctctggggaaaaaggttccttggggaagnaattttggggnggccccttttttttaanaagaaaaaggggggaaccaaaaaaaaccttaaaaggggggttaaaaggttggnaaaaccttttttgggggttttcctttaaggggaaaaattggggnccaaanggaaattccatgntcnaaaaggaaaaagnnaattccacccccagtngtnggcccccaaaacctttggtttaaggnccccttttttnaccaanccaaaattgggttccaatttaaggcccaaggccccccaaaaaattttccaaggttccaaggccttaattttgggaaaattttaaaaaagcctcttttaattttggggtcccttaaacctttttggncccca

SEQ ID NO: 1079 - DNA, 577 bp, Homo sapiens
  misc_feature 245, 280, 288, 297, 337, 340, 352, 360, 403, 406, 409, 420,436, 440, 461, 470, 477, 481, 489, 516, 518, 544, 546, 559: n = A,T,C or G
ccctttcgagcggccgcccgggcaggtacgcgggacacattcagaggtgagcccagagcgggtaaagtggactggggagaacttcggaggatgttcatgtccaggagcagccccacgccctgtatggtcggtgtctagagcctcacagcaactaagaccaacccagctctcaggaagaaggaaatgtcaaaatgtcatgttcaattttacattcagttgccttggaatcttttcttcacaattgnaaatggaaatgtggctgcaaggggaggttgaaatnccattgcnattaagtcnttcaagctcacaaagggaaattacctaccataaagaaagncanaggacccacagnactccaangaccgggaccattaaaatttgggattttgttttttttgcccantgngcncctggggaaanagaaaaagggttaacncttncgggcccggcggacccaccgnccttaaagngggccgnaaantttcccanggccaccaccttgggcccggggcccgntntaaccttaagatggggaatccccgangncttccgggtttancccaaagggctttggggg

SEQ ID NO: 1080 - DNA, 341 bp, Homo sapiens
  misc_feature 17, 59, 77, 111, 139, 282: n = A,T,C or G
cgcggggacacattcanaggtgagcccagagggggtaaagtggactggggagaacttcngaggatgttcatgtccangagcagccccacgccctgtatggtcggtgtctanagcctcacagcaactaagaccaacccanctctcagaagaaggaatgtcaaaatgtcatgttcaattttacattcagtgcctggaatcttttcttcacaattgaaatgaaatgtgctgaaggaggtgaatccatgcattaatcttcagctcacaaaggaaatactacataanaagcaagaccacagactcaagacggacataattggattttttttgccatggcctggaaa

SEQ ID NO: 1081 - DNA, 350 bp, Homo sapiens
acctttctttccaggccatggcaaaaaaaatccaattatgtccgtcttgagtctgtggtcttgcttcttatgtagtatttcctttgtgagctgaagattaatgcatggattcacctccttcagcacatttcatttcaattgtgaagaaaagattccaggcactgaatgtaaaattgaacatgacattttgacattccttcttctgagagctgggttggtcttagttgctgtgaggctctagacaccgaccatacagggcgtggggctgctcctggacatgaacatcctccgaagttctccccagtccactttacccgctctgggctcacctctgaatgtccccgcgtacc

SEQ ID NO: 1082 - DNA, 348 bp, Homo sapiens
  misc_feature 123, 163: n = A,T,C or G
ccctttcgagcggccgcccgggcaggtacctttctttccaggccatggcaaaaaaaatccaattatgtccgtcttgagtctgtggtcttgcttcttatgtagtatttcctttgtgagctgaanattaatgcatggattcacctccttcagcacatttcatttnaattgtgaagaaaagattccaggcactgaatgtaaaattgaacatgacattttgacattccttcttctgagagctgggttggtcttagttgctgtgaggctctagacaccgaccatacagggcgtggggctgctcctggacatgaacatcctccgaagttctccccagtccactttacccgctct

SEQ ID NO: 1083 - DNA, 336 bp, Homo sapiens
  misc_feature 20, 22, 25, 32, 34, 60, 66, 67, 68, 70, 77, 80, 98, 111,121, 130, 166, 179, 195, 201, 244, 272, 277, 291, 294: n = A,T,C or G
ccctttccagcggccgcccngncangtacgcngngagagggggtaaagtggactgggganaacttnnnangatgttnatntccaagaacagccccacnccctgtatggtcngcgtctatanccttcagcnactaaaaccaacccatctctcagaaaaaggaatgtnaaaatgtcatgtncaattttacattcagngcctgnaatcttttcttcacaattgaaatgaaatgtgctgaaggaggtnaatccatgcattaatcttcagcttacanagganatctacataagaancangacccagactcaagactggacataattggattttttttgcca

SEQ ID NO: 1084 - DNA, 530 bp, Homo sapiens
  misc_feature 490: n = A,T,C or G
tgcacttcaagaatgccgccagacagatagataaactcttcgtgaccgtgctgtttcacgatgcgaatcataccaggcttaatggcggtgagcagcggtgcgtggccagggtagatccccagttcaccttcgctacccgttacctggattttctcgaccagaccagagaacatttgttgctctgcgctgacgacgtccaggtggtaagtcattgccatatcaccctccgattaaggcgttaaagttttttggctttttccacagcttcttcgatggaaccgaccatgtagaacgcctgctccggcaggtgatcgtattcgccttccatgatgcctttaaagccacggatggtgtctttcagggagacgtatttacccggagaaccggtgaatacttctgccacgaagaacggctgggacaggaagcgctggatcttacgagcacgcgctaccaccagtttgtcttcttcagacagttcatccatacccangatggcgatgatgtctttcaattcctgataaccgttgcag

SEQ ID NO: 1085 - DNA, 359 bp, Homo sapiens
  misc_feature 54, 60, 107, 302: n = A,T,C or G
ggtactcggggacattcataggtgagcccagagcgggtaaagtggactgggganaacttnggaggatgttcatgtccaggagcagccccacgccctgtatggtcggngtctagagcctcacagcaactaagaccaacccagctctcagaagaaggaatgtcaaaatgtcatgttcaattttacattcagtgcctggaatcttttcttcacaattgaaatgaaatgtgctgaaggaggtgaatccatgcattaatcttcagctcacaaaggaaatactacataagaagcaagaccacagactnaagacggacataattggattttttttgccatggcctggaaagaaaggtacctgcccg

SEQ ID NO: 1086 - DNA, 360 bp, Homo sapiens
  misc_feature 35, 42, 110, 284: n = A,T,C or G
cccttagcgtggtcgcggccgaggtactggcacanactgcanccttggtgactctcccaaacacaggacactgtaggatgaaaccagagtgtgtgatctccagtcactanacattgctgagggtttaaaagcctgcctgcttgtgaatatccttccggtcttttttccttaagggcaaagcatcatccattcctatttggaagtgaggcttgagtttcaccttgaaaatgcagcaatttgcaccgctatgctgtatgcctcttatatactacatttatgattgncagaatttaatcctatagaatgctaaagaaccaacctgcaaaaggtcttgtctataccctcctctcccccacctca

SEQ ID NO: 1087 - DNA, 370 bp, Homo sapiens
  misc_feature 20, 24, 27: n = A,T,C or G
ccctttccagcggccgcccnggcnggnacacactagctgataagacactgttgcccataatgtctatttattggatcagcaatttataagtcccacattctcatgccacatagctctacacagctgcaaaaatataccatagcttgcaggtgatcattggtttgataaaagatattgagtcgctcatcttgtgaaagtgatctttgatataagaggagcatcagcggggaagctcacatgtcccgtggctcacacaccagaaggtatttgtgtcttgtcattgtctgtctggcagtccatggcaatggctttttcagagaggcctgttttgtggttaactgtgtgtacctcggccggaccacgctaaggg

SEQ ID NO: 1088 - DNA, 468 bp, Homo sapiens
  misc_feature 1, 39, 124, 188, 213, 257, 330, 339, 366, 370, 373, 399,405, 413, 419, 440, 442, 454, 458, 463, 464: n = A,T,C or G
naggtactggtctgcctgaaggctgagggcagtaaaatnattgacattactataatactgacctcaatcgagctaacctttaaattctgagaaacaggttttcaaacaggtttataggccaaanagagtctggaacaccctaagggcttggttttcctggccaagtaatcagtcaaagctattactgncactctgccttttccttgtggctanataacacagcccaagtgcagttgccaatttctaatgaatactangtgtggcctccattttatcctgtgcaaggggatattggaaatctttgttcgaagcaatatccacgagagaggnggcttcatncctcaaaagttaaggtggattttaaancaanttnggctgctttttaaccaaaattacagnatgggntattggangggccnaataaaatatttaataaggangnctaaataaatgnttgnaaaanntttt

SEQ ID NO: 1089 - DNA, 399 bp, Homo sapiens
  misc_feature 325, 379: n = A,T,C or G
ggtacttatggtgtgatgccctcaatctgggatttgctaagacatgcagcaggacaagtccatcccacggcatctaagacatccatgggaaatgccctgaggtcttactttttgcatttgttttagcagaacagaaactgggaggagggagttaaaagagctgatggaatccttttctcagcttctccaaatctctgagaaaataatttatttcacatcaaatattggaagtgaaaactcaatggacaaaaaacaaacaaaaaaatacatgatgtccatcaaaatgttgacctcttcaaggcatgaaataaaagggagcaaagcnggtaatattaatataccagaaaagccagtaagttttgttttaccgtttatgaanacctactacctcctgttttc

SEQ ID NO: 1090 - DNA, 403 bp, Homo sapiens
  misc_feature 1, 270, 273, 281, 304, 349, 352, 364: n = A,T,C or G
ncccttagcgtggtcgcggccgaggtacctctcatttgccacttttcaacacttcctggcaggcaggcagcataactggtcctgctgggtgatccagaccacactctgcaactctttcttctgagccaggctcccctactgtcttttcatttatgtcaaggcaggggaagacctcaaagggctcttgcatcccagtctcacttcccagagaggcacgaggccctccaggatgtggggacaggaactttggggcaagccggggttgtccanaanaataccangagggctgaatagtagaaagganaagtcttattggtgatatgtttgcaaactgggaaaagatagcctncantgtggagcaaanatgctccttcttcaaaaagggcaagggcagcttggattt

SEQ ID NO: 1091 - DNA, 278 bp, Homo sapiens
  misc_feature 239: n = A,T,C or G
cccttagcgtggtcgcggccgaggtactccctctcccctccctatctcaggaatgaagcttctgtgtctgctacaagcctccaatgccacaatgcaagctgttgagggggctcttcttcaacacctatgggcctgaaagattccagccacccaagatcttcagccctgaggttggaaactgacctgggggcctcagcttgctgtgactgtcactgcccatgtgttcttccccatgcctnccttcctcctccaagtgcgtgaaacatcaatgaaccttg

SEQ ID NO: 1092 - DNA, 343 bp, Homo sapiens
  misc_feature 299, 334: n = A,T,C or G
cccttagcgtggtcgcggccgaggtacgcgggcaaactcattagcaaagcacacaaagacctttgtgatgtggtattgctgaattaaactactggcagccctagaaaggtaaagtgtatttgatgcttctgtgctgttcccttagcccagaaagcccttccagtttctgtttagtaaagtcctattcatctttcactactcaatgagtcataagtaatcccattaggaaagcctgtgtgatctacctcctccctaatttgccagcttgagtttgcttcaccccttcataatactcaagncaatcataatgtcttataatccatcatagcacctnacacaatga

SEQ ID NO: 1093 - DNA, 392 bp, Homo sapiens
  misc_feature 290: n = A,T,C or G
cccttagcgtggtcgcggccgaggactgactgctactggtagacctagggtcagctttgaggactgaggtaaccaccacaggaaataagttttgaggtctgattttgaaacaatattggaagaccattcctttgtgagatagaaacttctccattttaattttagtattttaagcttttcctacaggtcagttgggaataatttttatttagggactcacaatcttgaatttttagctaaatgccttaagaataaaatattatttaaaaagtattaaaatgctgtgattncaaacagtttcttgttcaagatgaagaatataaaaatataccaccatgtctcggcaactggaaaagcagattttaattttcattccaaaaatgggagactga

SEQ ID NO: 1094 - DNA, 295 bp, Homo sapiens
cccttagcgtggtcgcggccgaggtactttgctacacggccgggggccattgagactgccatggaagacttgaaaggtcacgtagctgagacttctggagagaccattcaaggcttctggctcttgacaaagatagaccactggaacaatgagaaggagagaattctactggtcacagacaagactctcttgatctgcaaatacgacttcatcatgctgagttgtgtgcagctgcagcggattcctctgagcgctgtctatcgcatctgcctgggcaagttcacctttcctggga

SEQ ID NO: 1095 - DNA, 376 bp, Homo sapiens
  misc_feature 143: n = A,T,C or G
cccttgagcggccgcccgggcaggtactgattaattactgcagtaacctggcaaagagatctctcaaaagccctgcagcatcaaggtttttatgaatggcttagatgaggtggatacagcattcctgacttgtcgagtcttanaaacacaaagctactgctacaagagtggccatggggtcccaaaagagtctttacacacattacaaaaggctaaatctaaaaggattcaacataataaggtaagtggaagttccgcctggaactcccagaaatttagttgctcacaaaaaagccaaaggccaattcagtcttaatctgatacactagaagcacagggtcaaaacaggatgatcttccctgtcgcttatcccccg

SEQ ID NO: 1096 - DNA, 359 bp, Homo sapiens
  misc_feature 1, 124, 290, 304: n = A,T,C or G
nccctttcgagcggccgcccgggcaggtacttctgggtctaattaccaaattggtcccagggcagagaactctctctcctgcattgcaggggatgcctaggcagtgtgtaggcctaagcctganaactacccaggccttcccatactttggaagcagttgacacttgacttcttggtttccatctttgcactgtgctgtgtagccctgtgtgtaaacagcaggcactcatgtgccattgactcagggtcagaagcaccacagcattgactgtgtgctctctgactgaggngggaactgcggcancactgggtaacaggttggactgaagttggtctcatttggagagtggggagcaagg

SEQ ID NO: 1097 - DNA, 393 bp, Homo sapiens
cccttagcgtggtcgcggccgaggtacgcggggagagaactcatgagttttccgcttcatcgtctgcttctgttttctccatcttagtttgcccaaagcttgctggccgctgtgtagggctggtgagtggctggggctgtctgagccatgaacaacttcagggccaccatcctcttctgggcagcggcagcatgggctaaatcaggcaagccttcgggagagatggacgaagttggagttcaaaaatgcaagaatgccttgaaactacctgtcctggaagtcctacctggagggggctgggacaatctgcggaatgtggacatgggacgagttatggaattgacttactccaactgcaggacaacagaggatggacagtatatcatccctgat

SEQ ID NO: 1098 - DNA, 361 bp, Homo sapiens
ccctttcgagcggccgcccgggcaggtaccaagtgtccccaaaccaccaaattctgaatgccctgagctggctgaatgcagaccaaagactgggtgactgaccattgggaaggcactcgacactgtggacaggttaaacggttgatccccagctgttctgaataaatgtccacatgggttgattgtagagctaagtgaagcaactccagtggaaaggccaccttttgaaactactgaagccacagaaggtgtcgaagatgaagttggtgtagtagaggaggctgctgaggatggtaaccgttctccagactccatattgtgatcaatgtggtcaatcttgtgacatcacttgttgggaaac

SEQ ID NO: 1099 - DNA, 360 bp, Homo sapiens
actaacatcaataagtcgagaaaattatattaactgaaagaaaacaaaataatagagaattttattaaacgtatttctaatgtttctcttcatgtttggagaaaagctgccacataattaaaacaattcttaccctgtaaaactgattgtcttccaatctcaggaggtttacattaacaggaatatagaataagaaacaggcctatggccgggctccgtggctcacgcctgtaatcccaacactttgggatgccgaggcggacggatcacgaggtcaggaaatccagaccatcctggctaacgcggtaaaacctagtctctactaaaaatacgaaaaaaaaaaaggaaggaaggaaaaaa

SEQ ID NO: 1100 - DNA, 525 bp, Homo sapiens
  misc_feature 409, 486: n = A,T,C or G
acacgtggaagttaccccagtgcctcccactttagactacaggtcataactcggtgtgggagtagagccattccacccatggccaggaaagctgtgcccagttacaagtcctgtgacgccttaacataggaatagttctgtttttcaaacaagttgtcgagaagttaccaagaaaataaagaaccttcttcccacagaagaaggcagccagaatacccaagtcctagaaaacactatattgcaaaattagaacaaataataagatgtcttggccgggcgcggtggctcatgactgtaatcccagcactttgggaggccaagctgggtggatcacctgagactgggagttcgagagcagcctgactaacgtggagaaaccccatctctactaaaaatacaaaactagccnggcatggtggcgcacgcctataatcccagctactcagggaggctgaagcagaaaaatcacttgaacttgggaggcanaagtttgtggtgagctgaaatcgtgccatttgcgctcca

SEQ ID NO: 1101 - DNA, 224 bp, Homo sapiens
cccttagcgtggtcgcggccgaggtacctgcaaaggcactgaggtgggagggagcatgccaatgtagggaaatgaagaaacccagtgtgtatgagccaagctgaataaaacatgagaagaagctggagaatgagagagaccagtccccaagctctcaaggagcaagaggaagccttttcggcatttgaagtggagggatggcatgatctcgtgcgtagttttta

SEQ ID NO: 1102 - DNA, 401 bp, Homo sapiens
ccctttcgagcggccgcccgggcaggtacgcgggtcttttaactgttatggatgtataagcactatctatgatggacgaggcatagtgcatctcctaggccggaaatgtttcactcactaatgagctggacaattctactctgtgaatttaactttcctgactcccatatgcaggttaattttggtaacatatcatattttactctggcttggtgggattaggtgggaaattacagattgcatcaacaatttggtctgcctggatacaatttggtctgtttcaatcacagcctgggtcacacctgttgatatatatttttaaactgattcctctctagatcattctttctgatcagcacaaggcaatatgctgaaatttctcttttatatctgttttatta

SEQ ID NO: 1103 - DNA, 371 bp, Homo sapiens
acgcggggaggctgtaggtgggctccgctgggtaaaagttgccgcagcagctgtcccttggccccatcgcgatttatttttcccccttgctttccgggtcccgggatcccaagtttgtaactaacgggagcgaatccacacccgagcaaaatgtttgcgagtttcaggcgcccttagttgaaaggttgtaattaacaagtccgctgtttgccagccaggcgccgttgcaggcgctttctgtggattgtcatttatttcttacaagcaccctaggaggctgttatccttgacatctgcagcagcccttccaagctgtggagaccaggtcatctggaatgcccatttatgtcaatggaagaaagaaaaagggg

SEQ ID NO: 1104 - DNA, 401 bp, Homo sapiens
  misc_feature 146, 150, 346: n = A,T,C or G
ccctttcgagcggccgcccgggcaggtacagctgcttggccagggtccctggctctgcctacgtcatctgggtgtgtagctataataacaaaaatggcaaaaaggatattaagtggccatacctttctatcaaggaaagctacccnctgncacagactcatgatacctttaggattgaagattcgcacatcctggatttagcctgtgtgccatcaatgttctgtttattggaaggaaagaaattgatttcctgtttccttagttcattcatctattaataaacattttttaggcaccctacaggtcccagatactatgctatgcaggcagcaaaaacacaaataanacataatccctgcactgagggtctactggggtagtgtagcaggggtggtaggcaa

SEQ ID NO: 1105 - DNA, 397 bp, Homo sapiens
cccttagcgtggtcgcggccgaggtacaggtagggttcatttgcattcctgcaggtatcccagagggagggttctggaggaactttgagctgtctagattacccgatgaaaacttgttcttttatcaacggccacttccggagctcgcgcaggggccgctcactagaccactgctccctgcccgtgtgccccagttcagagtaatctgtattcttcacagtcccttcttccagtgaaagcatctcttttacctttcaccaagccttacctctaaaaggccagtgataccttagacatttcagaaagctcaaaatgatgactcaaaactataataagcaacgtgcctgtccctttacttttgttcccctgggagttatcaattggtcgtcttgaaatg

SEQ ID NO: 1106 - DNA, 407 bp, Homo sapiens
  misc_feature 106: n = A,T,C or G
cccttagcgtggtcgcggccgaggtactgatataggctgacctagaggaatgtattttatgaggccatttgttttttgttatgatgctttcaatcccttttacaantaactttttaaagtttcccctgaaacaagatgaggggacccatttctcttaaggagcacagcacactgaaaggctgtcagtggccagacgacccagccacacagaaaggcacccacagcagctgctttgtcttaaagggaaaaatactggcagatccaggagctgagaaaaatatcaaacgaggaagtatgactgccatttatatcttccccatgactatgtgactaggatactcagcatttttcctaccaaggtaatggcaatggggcaggagtaaggtcacagggaagctaaagaggga

SEQ ID NO: 1107 - DNA, 410 bp, Homo sapiens
  misc_feature 6, 94: n = A,T,C or G
cccttncgagcggccgcccgggcaggtactttcttaaaattaataaaaacttatcagtaaacaatttctattccatcagaaagtgagaaagctnaaagataaatcagtaaaatgatactagaaaaacaattatggctctctgtggttccccgatgagacttacaataatagtgctttaggatttagcattaaaattagatatattagtgttttattcatctctaagacagaatagttagtaatacttattctgccttctacacaatatggtggtgataaaattaaatcatgaataagaaaataagacaacttttatcaactatagatttataaacagtgacagcaatcctaaatgataagccattctggccataactctgtattttactccttcttttggaagactgaaa

SEQ ID NO: 1108 - DNA, 415 bp, Homo sapiens
cccttagcgtggtcgcggccgaggtacactggaggtagggagctcagggatggcagctcagatccggaacaattacaattcaatacttgggcatcagcactctaaatcccgaggagctagccaggagtgaagtgaggaaagagcaaatcaatttaaacattgctaaataccaaagacaagctagctatttcttactttgcatgaggcttgcccacgtcctttcttgtaaattgtctggaccatctctggtcatttggtggcatcagcaggacagagatatagtgagatgcagagagccatcgaagttgtctgacttggtggaaacaaatgtgacttggcttggagtgtcaaagcaagaatgagtgcgtgcatcagatggaagttgtccatggggtcttgcagacatgcatcgttg

SEQ ID NO: 1109 - DNA, 379 bp, Homo sapiens
acactgttctatattttagcagggaaggaatttgtgtatgtgtgtgctaactagaaacaatgagaaatagctctaatgaaagttatatggtcagaatttggctacaagctctgcatcattagtaaagcggagtattattggcagatgtcatgctactttccaaaaagcctgaacccatcctgatttctcctttcttagttgaaatgccaacaattgcatatttgcttaattattgctttttaaaatattggctctgtataagcaagggaaagtaatagaaaaagtattgttcttccaagtaaagcagaacacaccaagtggacaatagcagcttatattttcactcaacatgggatactatttttaataaggatgtttt

SEQ ID NO: 1110 - DNA, 402 bp, Homo sapiens
ccctttcgagcggccgcccgggcaggtactgaactgggaggtttttagtctgatagccacaattttgacctaggcaggaagctttacagcttgaggcagtttcatggtctgaagacaaacttcttgtgacttgctgccggtgttggactgcaggagagagcctcactgggtcaggagcacgagaacaaagtggatcccactaccacatcccacccctcctgtttcagaggcagatcatgggaccaggactactgagagttccatggccctacccatcatctgaaatgcccaagaacttctccgattaacaaaggtcaagcataaactctattgccaccaccacagctggttctcacttttaggtgctacctcctgtcctaaaggttgatctacacagtccct

SEQ ID NO: 1111 - DNA, 206 bp, Homo sapiens
actggcagcaaccaccactggatgaaggtgcttattgcatctcattctttggatctcatttttacccataggcctctggggcaccatattaaaattccagaggccattcctggccttgtttcataccttatgggaaatgacgcaggttatatggtatggatctataggtgtaaagactgggtagcaatggctggattggccgtacc

SEQ ID NO: 1112 - DNA, 424 bp, Homo sapiens
cccttagcgtggtcgcggccgaggtacaacgttagcagcaattcaaaagggcatcggagacaactaatcatttcataatgagcgaggggagaagcaataaaagccgggagcccaaggacggcatgataattttgcagagtctcagctctcaaccagactcacgttcataaaataaacaaatgtttttggtaatggaaagctaatgtatacattatttaaggatagtattaaaaccagactagatggatcaagtaatacaacagttacctcattaagcatcctttctttggggatgtgaaaaagttattcttttttttcttcttcttttttccttttgaaatggggctttattaattagagatgtaatgggaaatcttattttttccccagactagtggctgttttctgtttattttttaatgga

SEQ ID NO: 1113 - DNA, 418 bp, Homo sapiens
cccttagcgtggtcgcggccgaggtacaataatggctcattgcagcctcaacctccagggttcaatcaatcctcccacctcagtctcccaagtagtcaggactacagacatacagcaccacggccagctaagtagagacagggtttcaccatgttgcccacgctggtctcaaattcctatgctcaaacgatccgcctgccttggcctcccaaagtgctgggattacaagcatgagccatcatgcccagctcgtaaagatcttaagtcatataacaccctcactcagcttccaactggtgatagctatatcattacatacagaatatttgagtagatggttactaggacagcaagatgtaagttgctttggttcaaatagtggtttactagagtttaatctcaagtgttggttctgttt

SEQ ID NO: 1114 - DNA, 419 bp, Homo sapiens
  misc_feature 23, 41, 191: n = A,T,C or G
cccttagcgtggtcgcggccgangtacactctctgccttanaactaccatcctttgcactacattccagataaaggattttgttactacattctaggtaaaggatattgatactatcctcaagttacacagaaaacactcaaggatgtaaaatcaatatttatctcaaatttgttgactgctactgctatnttttttgaagaattaaaagataaattaaaatttctaaaaatatgccatatatcaataatttacaatagcttgatcagccaaaaaatccaccttgagcttaaagctagagtttgataggggtgatccttactctcctaatttaaatatcactgtatattagttttacaatatacagtgtatattgtgtatattgtgtatacaatatacagtgtatattctttttccaaa

SEQ ID NO: 1115 - DNA, 385 bp, Homo sapiens
acgaagtgtgtttcagagtggcgaggaagggcaagttgttaagattggttgttgaattagtttctgtttgatgttaaagagaacatagagtaaatgataatccctcgaaagtggagatcttggcaggctggcgcctggtggtatagtagaaatctgagaaagggggaggatattaagtcagttttatcaggtaaagttgaatgaaataatcaagtttaagtgcgtcttgggtatttgcaaagatgtatagattaaggctaaaagggttggagaaatagatttgggagttacctatgattttttttggttattctgctctcaggattgaaaactaaagaatctcagaactgcatttctaattagtgccataaaattctttattgat

SEQ ID NO: 1116 - DNA, 349 bp, Homo sapiens
ggtacgcggggacattcagaggtgagcccagagggggtaaagtggactggggagaacttcggaggatgttcatgtccaggagcagccccacgccctgtatggtcggtgtctagagcctcacagcaactaagaccaacccagctctcagaagaaggaatgtcaaaatgtcatgttcaattttacattcagtgcctggaatcttttcttcacaattgaaatgaaatgtgctgaaggaggtgaatccatgcattaatcttcagctcacaaaggaaatactacataagaagcaagaccacagactcaagacggacataattggatttttttgccatggcctggaaagaaaggt

SEQ ID NO: 1117 - DNA, 627 bp, Homo sapiens
  misc_feature 486, 510, 516, 529, 558, 562, 575, 577, 580, 599: n = A,T,C or G
acctgccttgttcatatccaactaattttttttggctaattaagtaataataatcaaaacacttaaggttttaaaggatgaatgaccagttgagagttacttcttatttgctcctaaatccaatatatttcctgatcagtcaataacacttagaacatctagttataattggtaatacaattgtttaaaaaatgataattaaaaggactaagactatatatggtcttttgaggggataacaattgaattatttaaacaaagtatattaggataataaaacacgagaagtcagtccagtggttcaatccattattcagaatttcattctgtttataattaagcaacagtgaccttcaggttagtcttccttagctgttaacaaccagctggagaagctgagggctatttttgcaattataatctgtgaaagattgaaaaaccgttaagataaataacgtgtccaccttattaacaggcactcatttncacactttgaatacatatcaatangggttncaagttcaatttncttaccgaactttttttaactcttttaanaaancccctgtagggangnggngcctcactggactcttttntgggcattgcaatctaatttcaaaagct

SEQ ID NO: 1118 - DNA, 360 bp, Homo sapiens
actctgtttcaggccctcactgggtgccggagatccactagaatacaagatctgtttctgtgtctttgagggacatgtatccagcaattagttacatcagtcccttgtagatgtcaattccagtgtcacaaatttcttgttttgcaacgttgagcaagtttttttcaatgtttctaagcctcagttttttgccctacaaaatgtggtaataatatttaaccattagtaatgttgtgaaaattaagcaaaaatacatgtaatatatttaacaatgcttggtgttcgttaatgctttaatatatgctaactacttatattattgttgttgttgtgttaaacatgcataagacagcaggtacc

SEQ ID NO: 1119 - DNA, 213 bp, Homo sapiens
  misc_feature 1, 15, 133, 153, 158: n = A,T,C or G
ngagcgccgcccggncaggtacctctatcttgctccaccattgctgcctctgatttttccctatcaaaacaattatgaggtcttttccgcagactgtgttagcagtttttgcatcctctgctcattcctctgnctccttgtcttcctctccanctcancccatgccctgtcagtgccgcccagctcacaattgcctgatccttggtgggtacc

SEQ ID NO: 1120 - DNA, 302 bp, Homo sapiens
cccttagcgtggtcgcggccgaggtacatctacagagtggtgggactgggccaggccttgaacccagtggtctgattcagagcccatgctcttattagtgtttcccacaaatgggtagtgaagtaaatttctgataaaatgaaaagttctctttgtatactgatatccattacaaaacctgcaggactacagcacttcacaaaatgcatcatttccacaaacagtgatgttctttttcagggtaaactatattgcaataacagcaaatatgaaaagatactaatatagtatctcacatgccc

SEQ ID NO: 1121 - DNA, 392 bp, Homo sapiens
ggtacccagagagccagaaggctgttggtgagatggagcagtcactgagcgggtcaccaggagaacttactttatgagatctgctgctaatttctgactttgggcaagtcacctcaccagtctggggctaagattcactcctcatcagtaaaatgaatactttggatgagacgggaggttttcccattctgatgctaggatcttgttcatgagttaatgaagacagttgaggaaggtaaggagctatttctacttgattagtgaggcttcagtctatttcaacatttcaaagtttttcatgataatttgttcatgaaaaaaaaagaaaacagaggagttgctccagctctaaaaaaatttgaaaaccacaccctgtgctaattgcaagtcta

SEQ ID NO: 1122 - DNA, 475 bp, Homo sapiens
  misc_feature 148, 150, 173, 178, 179, 188, 193, 195, 197, 200, 206, 220,226, 229, 238, 240, 259, 277, 296, 304, 319, 324, 325, 336,340, 346, 355, 364, 385, 400, 402, 403, 405, 415, 420, 436,446, 447: n = A,T,C or G
cccttagcgtggtcgcggccgaggtgcagctgttgtccatgtgtagagcttttaataaccagcgcagcaggccccttcacctgcttttatgcctggaccagatgactgaatgtagaactttaggcacttttttttttttgaaacggantntcggtttgttgcccaggctggantgcannggcccaatntcggntnantgnaagctntgccccccgggttnaccccnttnttttgcctnancctcccaagtagctgggantacaaactcccaccaccntgcccggctaatttttatnttttttantaaaaacagggtttnaccgnnttacccagganggtntaaatntcctgaccnggggatccncctgccttggcctcccaaagngctgggattacaggngnnanccaccaaatnggccntttaggccctttttanttttaaaggnnaaaaaacatcctttaaaaagttaattcc

SEQ ID NO: 1123 - DNA, 398 bp, Homo sapiens
ccctttcgagcggccgcccgggcaggtactcaagctttggcttttctgaactttccttattttcaaaaatgtcccccagccccacttccacctgagacattcacacaccccatttcctcttccaggaaggctcttatgtcgcctgggtaaacttactcttcaagtctagtgacttttttccagaagctttcctgatatctttccatttcaccccactgctgacttattaaaatttctagaattttatacttttacactacattctctgtgttgtattctcttattcagggtctgctatttaatttttaagttccttgaaaatagagacaatttcattgttttcatcagtttggtccaagtatatataacatagatgaaaaatagatattttgtattat

SEQ ID NO: 1124 - DNA, 284 bp, Homo sapiens
  misc_feature 251, 268: n = A,T,C or G
cccttagcgtggtcgcggccgaggtactttttgcattttcaaatgactttgactattgccagagtcattatagacctgcctatgatgtaggagtttattgtatctagtggaaaacatacctgtttgtggggcagaagcttctgttccattcatcctgattttagacacagcatttaacttttcaggttcagttccatatgtataaagtagggataatagtgacatcctagtgtattaagaattaaggtgtnattatttctgtcactgntacttcaccctaattt

SEQ ID NO: 1125 - DNA, 401 bp, Homo sapiens
ccctttcgagcggccgcccgggcaggtaccaccatgcctagctaattttttgtatttttagtagagacagggtttcagcatgttggccaagctggtctcaaactcctggcctcctgtaatctgcccgcctgagcctcccaaaatgctgggactataggagtgagccactgcgcccagccttcaaattcattcttttacttctgtaatcctagttgtttaagaaattttgcaaattcaattaattttcttttccctttccctctctcactgatttgtcactttctcaataaagaattcaaggtttgaaaaattattgtggcggcagtattcaaaaaactttccttcactaaacacacacttaactgtgttccactactgctgttgtctatactttaagggaa

SEQ ID NO: 1126 - DNA, 403 bp, Homo sapiens
cccttagcgtggtcgcggccgaggtacaggtaagggggaagttccaaagctgttagtcaccttgttttcatgctgatcacccaaccagatctaatgtttgatgttctaagaactttaatgttttggaggaaatatcttgtggccttcaaaaaatcattctgtgaaatagttgtttctacctacattcgtctcattaatttttctacatacagcagaattctgcatatattagaggtaactcagtcagggtgtcatggaggaaggtggcccatggttcaccatcttgccaatagaaaaaccaataggaagtcatctaaccatcattcggagggattgaggtctgtcatagggagaacaaactaaagaactggactttgctttcagtcaagatggagtaacaggg

SEQ ID NO: 1127 - DNA, 405 bp, Homo sapiens
cccttagcgtggtcgcggccgaggtaccaggttcaaatagtcagcagctcatcataatcaatgagcgaggacataaagtaggaaaaatgcatcaccatggtgagcaaggaaggcaagttattggaggcacatgttaacacataaaatataaaattaatatgatcacactggaaaggcttgcctgagcccacagtttgaatgcctacaataagatgagatgcacaacaaaaagcaagagaacctgatcaagtgggtgacctggccatggtgctctcatcagtggggacccaaatgcttatgtggactcaccaggtatcgaattagacatgaataggagtgtttgttgtgatggcaagaaactatataatcaaatgaatacaatgaaactttaaaaataattgtaag

SEQ ID NO: 1128 - DNA, 405 bp, Homo sapiens
ccctttcgagcggccgcccgggcaggtacagacggtcagaaggaaagaaggagagggattgcctgctgcctccccgcgtgcacacacgagagtgggtgctcccaccagctttcagggggctttcttcacgaatgtgagcactgattttgggagatctgcagtggaaagtcaagtcatgaatattttttataaagagagaaatgatgtaattttatcacagaagatatttcagatgtatttttccattttaaaaattcattggcagtgctcatacaagagaattacttgactgaaaatgactctgtccagtttcttcctatttcgttaatgattttgcagtcactgaattctttctaaaagttgtataacccagataaagtcaggcctcctggaagccagcttcag

SEQ ID NO: 1129 - DNA, 353 bp, Homo sapiens
  misc_feature 96, 111, 207, 326, 328, 342: n = A,T,C or G
ggtacaggaggcagcttttttctgctctctgttgacttctgaagccagcctcatgatcgtttctctgctagcttttgcttccatctcatggacatntatagtctcttcaanaataacaatttgtcctttcacgaattcattttctttgcgcaggtctctaagctgaagagaaagcaattacagctgtcctataaaaattaacaattncatcattttctctaagcaagtcacatctatagactgcattatcatatgaaaaatgtaagagcactatccctacatggactggaaaggtcacattttcaaaggcagcctgtaaactctgngnttagacctgggggncaaattcaaat

SEQ ID NO: 1130 - DNA, 341 bp, Homo sapiens
ccctttcgagcggccgcccgggcaggtactttgctacacggccgggggccattgagactgccatggaagacttgaaaggtcacgtagctgagacttctggagagaccattcaaggcttctggctcttgacaaagatagaccactggaacaatgagaaggagagaattctactggtcacagacaagactctcttgatctgcaaatacgacttcatcatgctgagttgtgtgcagctgcagcggattcctctgagcgctgtctatcgcatctgcctgggcaagttcaccttccctgggatgtccctggacaagagacaaggagaaggccttaggatctactgg

SEQ ID NO: 1131 - DNA, 396 bp, Homo sapiens
ccctttcgagcggccgcccgggcaggtacctattctctcaattttgaaacggcaaaaaatttttaaaaattaaataacattcatgctctgttttggactgacatcccaagattttagtgtagggcagtaattttcattttcaaattacaatgcaccttccattcctcagagaaaagtaagtttctttttctacctcactgtctcctggctctcaaaccctcctaggctagtaagcgtcttcagcccagatgaagaaataagaaaatcctatggaagggctttcttgcttgaggctatagtaacagccacaaaacacccacacacttttaaaattcttacctcgggggtagggatagcattaggagatatacctaatgtaaatgatgaagttaatgg

SEQ ID NO: 1132 - DNA, 313 bp, Homo sapiens
cccttagcgtggtcgcggccgaggtaccaaactgctgtccccaaataaagaacttacatcaacaaggaatataaaaatgttatttaggacttctgttctcagatgtttaatacaaaggagagattgttgtgccagggaacaaagtgatccaatatccacgaagccagaattctcctactgcacattttgtttccaaaacactaaggaatacagcaagatttcaagttggagtaaagaagctacttctggaaacaagagaggagataactgaggactttcacagaggggctgaaatccttcccggaaaactgtg

SEQ ID NO: 1133 - DNA, 331 bp, Homo sapiens
ccctttcgagcggccgcccgggcaggtactaccggacctgtttcatctctgcttcccaagcctcaggcctgggcctcagggattctctccagtgcataccttaggctacagctatagggcagctgtggttagggaaggtccctatttagaatagttggtcaaaaagcacatcacttctgtccctttcttgcagaactggttgctgctctggaatgaaagtttgattggtctgttagccatgcccacctggatttgggaaagccaatagaaagaatcttctgctctcctatctgctgttgctttttaacctgtagcctaaaaaatggcatta

SEQ ID NO: 1134 - DNA, 330 bp, Homo sapiens
ggacacacagttaaccacaaaacaggcctctctgaaaaagccattgccatggactgccagacagacaatgacaagacacaaataccttctggtgtgtgagccacgggacatgtgagcttccccgctgatgctcctcttatatcaaagatcacttttacaagatgagcgactcaatatcttttatcaaaccaatgatcacctgcaagctatggtatatttttgcagctgtgtagagctatgtggcatgagaatgtgggacttataaattgctgatccaataaatagacattatgggcaacagtgtcttatcagctagtgtgtacctgcccg

SEQ ID NO: 1135 - DNA, 356 bp, Homo sapiens
ccctttcgagcggccgcccgggcaggtacttttctttatgaatgttataccagaacttaggaggaaaaaatttttgagcatactgaatattaggaattggatatctccctaaattattaaagttcatcttccataaattctgtaaaactgaatgtagtatttccccctcttcccatgcaagtaactgatatcactttagaaaacctgatatgaacattatttgttattgtgcttttatgaagaattctgtctaatcttctcataagaagaaagaattagaaccaaaaatctaattatcagatttagtaagatgtaggcaagatcccctatttttttcatttatgtctttcaaaatc

SEQ ID NO: 1136 - DNA, 379 bp, Homo sapiens
cccttagcgtggtcgcggccgaggtacgcaacatgacattggctggtgtaaagatcttacaattatttttaaaatttcattgtattcatttgattatatagtttcttgccatcacaacaaacactcctattcatgtctaattcgatacctggtgagtccacataagcatttgggtccccactgatgagagcaccatggccaggtcacccacttgatcaggttctcttgctttttgttgtgcatctcatcttattgtaggcattcaaactgtgggctcaggcaagcctttccagtgtgatcatattaattttatattttatgtgttaacatgtgcctccaataacttgctttccttgctcaccatggtgatgcatttttc

SEQ ID NO: 1137 - DNA, 362 bp, Homo sapiens
acggggagcccctttttcctcttctccagggtcttaatagggtctggaaagactcacctggtccaaaaagtttgaggaagaagcttctagtcttcagctctgtagggtcaacatgagatgcttattgttcaagcctgtgtgatccacccaaaagtaggctgctctactacggcatccatgctgctgtgaccggatggaccacaggacagttgagaccccagctagatatctgccaaacccaggactgtcagcaagggaatagggttcaggtcttctccatttataaactaccaacccctctttactctggaatattctcactctcctggctgggatagacagtgttggctcattccactccc

SEQ ID NO: 1138 - DNA, 387 bp, Homo sapiens
ccctttcgagcggccgcccgggcaggtacgcggggaaacaggctactgctattaaggattgcacaacttctgggcaaggcagaggtgggtttggctttttaaaaattttttcagcctgtcctcatggaactacatattcttttctaagaacttttcatcctaacctccctactcacatcttctaagtgtctctgctctggtgggaatgtgatggacaacacagagccatctcagaagcctctgtggccaccaccaggccggccagggtgcagggggccactccctgggcagccatagggttctcagcaaggtgcattcgtcgtccctgctgagaatctgatggggcagcatttttttttaattaaatgcaagctgagtcatttcaac

SEQ ID NO: 1139 - DNA, 386 bp, Homo sapiens
  misc_feature 1, 2, 34: n = A,T,C or G
nncccttagcgtggtcgcggccgaggtacaacgntagcagcaattcaaaagggcatcggagacaactaatcatttcataatgagcgaggggagaagcaataaaagccgggagcccaaggacggcatgataattttgcagagtctcagctctcaaccagactcacgttcataaaataaacaaatgtttttggtaatggaaagctaatgtatacattatttaaggatagtattaaaaccagactagatggatcaagtaatacaacagttacctcattaagcatcctttctttggggatgtgaaaaagttattcttttttttcttcttcttttttccttttgaaatggggctttattaattagagatgtaatgggaaatcttatttttt

SEQ ID NO: 1140 - DNA, 387 bp, Homo sapiens
ccctttcgagcggccgcccgggcaggtacatggctaaaatcattatactttccccgtcttatgataatctcagcaaaacacaagcacggattctttcctagtcttcctgcccatccaccgcccgccattttccctggaccccgtgtgatgacagtgaggcctccttattccttgtccagcagggattgtggtatgagtgtgttcagggacagttatgagtggaagttggggagagacgtggaagggcggttttgtgtggcgtctgtgccattacagcctcagctacagagactgcacttgcgggcagctgcagtgctggaagcagatggggccctgtgcgaggggtcagtggaaggcagtgactttgagagctctgatggtagttgt

SEQ ID NO: 1141 - DNA, 385 bp, Homo sapiens
cccttagcgtggtcgcggccgaggtacttctatacagtggaatgctactcagcaatgaaaaagaaaaagatgcaacaacctggatagacctcaaaggcattatgtatagtaaaaaggtcaaccttaaaaggttatatattatatgattgcatttatataacattctcaaaataaaaaaaactatagaggatgaagaatagactagtgatttccagggcacagggacagggtaggaaagaattggtagacaatgtgaatgcaaagaggtctcctgtgttgatggaacagtctgtatcttgattgtggtagtggctactcaaatctatgtatggaataaattaaataaaattatacatatacacacaaataactgcaggtttaaaat

SEQ ID NO: 1142 - DNA, 388 bp, Homo sapiens
ccctttcgagcggccgcccgggcaggtacagtggcctagatggctttagacttcaggattctttaccatctagccccttttactctaccaacttattttgttacttgttgacataatctgtagccaggaaagcctgcatacagtttgttatccctctgtctttgctcatgcgttttctgcatctggaatcatcttcctctcttctctctgctggttcatgtccctattttctttcaaaactctctttgaaatttacatttttcaggaagcctttctctttggcttgctggacatctgaccggcatgttatcttttcatatttgttcaaaatgtcattttcaacatttactcaactaattaatatcaaggacttgccatcaattctctt

SEQ ID NO: 1143 - DNA, 133 bp, Homo sapiens
cccttagcgtggtcgcggccgaggtacagctgttgtccatgtgtagagcttttaataaccagcgcagcaggccccttcacctgcttttatgcctggaccagatgactgaatgtagaactttaggcactttttt

SEQ ID NO: 1144 - DNA, 381 bp, Homo sapiens
  misc_feature 69, 293: n = A,T,C or G
gccgcccgggcaggtacactgttctatattttagcagggaaggaatttgtgtatgtgtgtgctaactanaaacaatgagaaatagctctaatgaaagttatatggtcagaatttggctacaagctctgcatcattagtaaagcggagtattattggcagatgtcatgctactttccaaaaagcctgaacccatcctgatttctcctttcttagttgaaatgccaacaattgcatatttgcttaattattgctttttaaaatattggctctgtataagcaagggaaagtaatanaaaaagtattgttcttccaagtaaagcagaacacaccaagtggacaatagcagcttatattttcactcaacatgggatactattttta

SEQ ID NO: 1145 - DNA, 392 bp, Homo sapiens
ccctttcgagcggccgcccgggcaggtacacagcatgcaggctgcagcctgggcccctgccaggcaagatgtagggtgtgaggttgtgctctgccccattcactctggaacagctccgcccttgagtccaggatattttctcagtgcctccacgcatttgaccatccagaaaacatcccaactcagtgtgcctcggccaccataaatcagccaaccacacatgctgccctcaatgcttctgaatatcaagggaaaggatctgcctcatcctgccctgctcctgaggcttgcgcattgacgcttgagttatgtcattatttttttaagtgatagaaatctagtcaatgatttgtagcaatcaccactgtgcaacgtatgccaaaaaactctgt

SEQ ID NO: 1146 - DNA, 334 bp, Homo sapiens
  misc_feature 7, 155, 224, 239: n = A,T,C or G
cccttancgtggtcgcggccgaggtacacctcccaatgtggagcctggaaccctgggaagggcaggcgggcagagcctcctcacagggactggagtcttgggaggtttaccctataggaagagagcagtgattcgtgttgctcaggattccttanattcctttgggagagttaatcatctttactacccagagtgcacccttaggtctaggttgtcatacccantgattgatatcttanggtaaaagacgacctgagaatggtctggccatgatcataaagatcggattgctatgatcatgatcagtcagggctttggtgttttattctaattg

SEQ ID NO: 1147 - DNA, 368 bp, Homo sapiens
ccctttcgagcggccgcccgggcaggtacgcggggacattcagaggtgagcccagagcgggtaaagtggactggggagaacttcggaggatgttcatgtccaggagcagccccacgccctgtatggtcggtgtctagagcctcacagcaactaagaccaacccagctctcagaagaaggaatgtcaaaatgtcatgttcaattttacattcagtgcctggaatcttttcttcacaattgaaatgaaatgtgctgaaggaggtgaatccatgcattaatcttcagctcacaaaggaaatactacataagaagcaagaccacagactcaagacggacataattggattttttttgccatggcctggaaag

SEQ ID NO: 1148 - DNA, 309 bp, Homo sapiens
  misc_feature 155: n = A,T,C or G
ccctttcgagcggccgcccgggcaggtacaaaagctgagggaaaaagtttcagcttcaagcattaacgttttagttcataaatctgaaggaaaataaagagaaaataaaggcattaagagatatgaaacaatgtaaaaatgaatatttcttttangaatccttgtgaatatatgacagtatacaagctacagaaaactagtttactgggaggatcacgaggtcaggagatctagaccatcctggctaacacggcgaaaccctcttctctactaaaaaatacaaaaaattagccaggagtggtggcgggc

SEQ ID NO: 1149 - DNA, 317 bp, Homo sapiens
  misc_feature 1, 159, 273: n = A,T,C or G
nggggccctttcgagcggccgcccgggcaggtacaaggttggtaggaggaagagaagaaatgattggctcccagaggcttcatgggctcccaattcatgattctttctctgtggctaatttttgttaagtataagaattccaggaatctcttaggaatnggggagactgctttctcctgaaatataaaacatctgctcttggtctgtttggcgctccactgtctgaggggaaaacagggaaaaagaggtaatataaaacagacattgtttcanacaataaatccccctttactcattaatgagaaaataaatttagg

SEQ ID NO: 1150 - DNA, 324 bp, Homo sapiens
  misc_feature 1, 2: n = A,T,C or G
nnggggcccttagcgtggtcgcggccgaggtacaccaggcaaaagacagtgggagccctacctaaggtcaaggcagagggatagagagtaggagacagattctaggttacaaagttacagctgcaaagactgagtcagctagttgtggtcacgggcaggagtaggaggaggaaggtaggggctagtcaaggtcagcgtgttgggtcctgctgcggtcactgccaggttcttccatggctccgaaggtggaccacaggagctttctccatccccagaaaacctgttgtcagctcctctgaactccatctactgtgcatgtggcac

SEQ ID NO: 1151 - DNA, 304 bp, Homo sapiens
  misc_feature 146, 147: n = A,T,C or G
agcggccgcccgggcaggtacacactagctgataagacactgttgcccataatgtctatttattggatcagcaatttataagtcccacattctcatgccacatagctctacacagctgcaaaaatataccatagcttgcaggtgannattggtttgataaaagatattgagtcgctcatcttgtgaaagtgatctttgatataagaggagcatcagcggggaagctcacatgtcccgtggctcacacaccagaaggtatttgtgtcttgtcattgtctgtctggcagtccatggcaatggcttt

SEQ ID NO: 1152 - DNA, 433 bp, Homo sapiens
ccctttcgagcggccgcccgggcaggtacatgacattttgcactcagtggtatccctaggacttgtttgaatacattgctgtatttatctaaaagggcaaagctttcattaaaaataatctagtggcaatgttgcacagccctaattctctactacatgaaaagttatattttcaggcccagagacacaggattacaggtcagtgataggcaatgcatatttgaagtataccaaaagcaccaaataatgtagctgagtatccagaaggaactgacataaaatgcaggggtctaattactagagtcattgccacagaaccagtcatcgatgactaaattatgcacctggtttcctgggaaaatctgcagtttggggaacatttcactacacttcagagcattttaagtctttaaatcatttagcttttaaaatc

SEQ ID NO: 1153 - DNA, 392 bp, Homo sapiens
gccgcccgggcaggtaccctaaacaaatattaatacatagactctgagtgcatgctgctcacctataaattcatgcttgggtaaaagaacatgcttttacgatagtctgagtcttaaagagaaaggcatcaagtgcaggtcacctggcttcccttctgccatagacaccagataaattccaaaaaatgcaggggatgtgggtctagagctttcctaactttgtaattatcgcaactggttctgaaagttactatatcctcagtaaagaattcaaagagactaagtctgcttctccaggtctccaactctgagaacacttggaactctgatgtagatctcaacatactgaaatccagttttcctgtctctagcctttgactcagaagcaccac

SEQ ID NO: 1154 - DNA, 339 bp, Homo sapiens
  misc_feature 48, 283, 329: n = A,T,C or G
cccttagcgtggtcgcggccgaggtaccttctaaatgccaggctcatntacggccataccaccctggacgtgcccaatctcgtctacgtgccaggcttgggggcatatgcagatacatgggacagatcccttggaggatacagacagataagctcatggttcctgcacagggtggtgtgggctcttactgctgagctgagacctatgtggtgactgtgttggactgaaccccagggaaaggtgtggggtcgggtgtgatgggcacaaacagaaaagtggctgntatgattcacaaacttattgcatgtcattgtacctgcccgggcggncgctcaaggg

SEQ ID NO: 1155 - DNA, 426 bp, Homo sapiens
ccctttcgagcggccgcccgggcaggtactggggcactcattctgcatgctccgagagatgcacttccagtttccgaagaagggtcctagaatgcttttttgcacccggctttttaccctatcatcattcattttcctaggcagttttgttgtttcctttcttctgcaaagccgggtagatgtctctcacagacaagctagaaatgctgagagcttctgatactctgtttcctgtgcctctgtctactgtgctaaaataaatacttctaacttcctttttggaaaccatagcaattatttcattgctttgaagaccttcatactcctggtccccaccctgcaacatggattcctgtggctgctttcttccaaatgctacagtgctcagtgttgactttttcaagatgactcacatgtaacttaatg

SEQ ID NO: 1156 - DNA, 403 bp, Homo sapiens
  misc_feature 50, 57, 85, 100, 118, 154, 219, 224, 226, 247, 261: n = A,T,C or G
cccttagcgtggtcgcggccgaggtacttttttttttttttttttttttngacacanagtttcactcttgttgcccaggctaganagccatggtgcaatntcagctcaccacaacctntgcctcctgggttctagccattctcctgggaggcanaggttgcagtgtgccaagatcacgccattgcaatccaccctgggcgacaagagcaaaactccatntcatntnagaaaaaaagaaaaaaaaaangaaaagaaaaatanatgagcatcataatcaaaaaggcagccctaagaataaatgaaaagttcacagaaaaaaataaaaatgcaaatatcccttaaacacagaaaaagtttctaagctcattcttaaaagggaaaatgcaaataattaactaattaa

SEQ ID NO: 1157 - DNA, 430 bp, Homo sapiens
cccttagcgtggtcgcggccgaggtacttttctttatgaatgttataccagaacttaggaggaaaaaatttttgagcatactgaatattaggaattggatatctccctaaattattaaagttcatcttccataaattctgtaaaactgaatgtagtatttccccctcttcccatgcaagtaactgatatcactttagaaaacctgatatgaacattatttgttattgtgcttttatgaagaattctgtctaatcttctcataagaagaaagaattagaaccaaaaatctaattatcagatttagtaagatgtaggcaagatccacctattttttcatttatgtctttcaaaatcaatcacattctattattcaccgatccactaaacagatgtagaattcctattatgtagcaggcattgttctgttaat

SEQ ID NO: 1158 - DNA, 354 bp, Homo sapiens
  misc_feature 65: n = A,T,C or G
ggtacgcggggagacacattcagaggtgagcccagagggggtaaagtggactggggagaacttcngaggatgttcatgtccaggagcagccccacgccctgtatggtcggtgtctagagcctcacagcaactaagaccaacccagctctcagaagaaggaatgtcaaaatgtcatgttcaattttacattcagtgcctggaatcttttcttcacaattgaaatgaaatgtgctgaaggaggtgaatccatgcattaatcttcagctcacaaaggaaatactacataagaagcaagaccacagactcaagacggacataattggattttttttgccatggcctgtaaagaaaggt

SEQ ID NO: 1159 - DNA, 351 bp, Homo sapiens
  misc_feature 196, 261, 293: n = A,T,C or G
cccttagcgtggtcgcggccgaggtacatgtgcacaacgtgcaggtttgttacatatgtatacatgtgccgtgttggtgtgctgcacccattaactcatcatttacattaggtatatctcctaatgctatccctacccccgaggtaagaattttaaaagtgtgcgggtgttttgtggctgttactatagcctcaancaagaaagcccttccataggattttcttatttcttcatctgggctgaagacgcttactagcctangagggtttgagagccaggagacagtgaggtanaaaaagaaacttacttttctctgaggaatggaaggtgcattgtaatttgaaaatgaaa

SEQ ID NO: 1160 - DNA, 365 bp, Homo sapiens
  misc_feature 253, 295, 297, 348: n = A,T,C or G
ccctttcgagcggccgcccgggcaggtacttttttttctttctttctttctttttttttttttgtatttttagtagagactaggttttaccgtgttagccaggatggtctggatttcctgacctcgtgatccgtccgcctcggcatcccaaagtgttgggattacaggcgtgagccacggagcccggccataggcctgtttcttattctatattcctgttaatgtaaacctcctgagattggaagacaatcanttttacagggtaagaattgttttaattatgtggcagcttttntncaaacatgaagagaaacattagaaatacgtttaataaaattctctattatnttgttttctttcagtta

SEQ ID NO: 1161 - DNA, 372 bp, Homo sapiens
  misc_feature 365: n = A,T,C or G
ccctttcgagcggccgcccgggcaggtacgcgggggacattcagaggtgagcccagagggggtaaagtggactggggagaacttcggaggatgttcatgtccaggagcagccccacgccctgtatggtcggtgtctagagcctcacagcaactaagaccaacccagctctcagaagaaggaatgtcaaaatgtcatgttcaattttacattcagtgcctggaatcttttcttcacaattgaaatgaaatgtgctgaaggaggtgaatccatgcattaatcttcagctcacaaaggaaatactacataagaagcaagaccacagactcaagacggacataattggattttttttgccatggcctgnaaagaaa

SEQ ID NO: 1162 - DNA, 409 bp, Homo sapiens
ccctttcgagcggccgcccgggcaggtactcttccttccagaggtttccccatgccctcttttggacttgatgggggtcatttgggacaataaggcctgataactccttggacttaggaagcgagagagcaggaatcaagaaaagcttttgtgttttttggtttgtgtagaaaatatgatggattgagataaaatttttcaaaataggcccaatgaagaagagcagattcaaggagtaaaggattatttatgaggatggcctgtgcaaaaagacacccagagatttcatgctgttgattcacagaaagcctgttcctcttcactccgtagagtcctcagagtctggatcatcccttacagaagatccttgataatatttctgatatacctccaaggttccgtttgtcaa

SEQ ID NO: 1163 - DNA, 253 bp, Homo sapiens
  misc_feature 228, 234: n = A,T,C or G
acctggcttctcttggccagatcgaaggactgtaatatgatttaagttgtgaatatgccttagtatgtgagatgtcttttcatatgagggagttcttaacctactttagcttaatcaccagatccttttgtcttttatgctaacacataaaaaacacaggcttggtattacagctttttgtcttctatgcatgagcagttttgttttgtatcccagggatcccagaanaacagntttgcttggccagggtacc

SEQ ID NO: 1164 - DNA, 296 bp, Homo sapiens
  misc_feature 80, 262, 267, 271, 283: n = A,T,C or G
cccttagcgtggtcgcggccgaggtacgcggggaattgctaatgggaatggggtttattttgaggtgatagaaatattgntgaaattagaaattggcggtgattgctaatgggaatggggtttattttgaggtgatagaaatattgatgaaattagaaattggcggtgattgctaatgggaatggggtttattttgaggtgatagaaatattgatgaaattagaaattggcggtgattgctaatgggaatggtgtttatttngaggngatngaaatattgatnaaattagaaattg

SEQ ID NO: 1165 - DNA, 414 bp, Homo sapiens
  misc_feature 300: n = A,T,C or G
ccctttcgagcggccgcccgggcaggtacaaaacaaagacccttgccttcactgcactcatgttctagttgtgcgttgtgcgtgtctttatttctcaataagagtttcatggccctaccacctaaaaatgccacaaaacaacaatcccacaatcccattcagaaagtgaatgcatttaacttgaaacacgcagtataaatctaaaggaacagggtcaaataaatgaagctgaggctgtggctcatacttgtaatcccaccactttgggaggcccaggtaggatgttcacttgaggccaanagcttgttaccagcctgggcaacaaggtgagaccccatctctattaaaaacaaacaaacaaacaaacaaacaaacatgaggctgagaaaaaaatggcaagggatatcaaaaact

SEQ ID NO: 1166 - DNA, 358 bp, Homo sapiens
  misc_feature 136, 227, 256, 289: n = A,T,C or G
ggtacctggctgtgctagacaggggaaaggagatgctttcattgctggcattttaatggggtccaggacactatggggaggggatttaggaagaaggctaagccagcagtggaagacatttggaagcttggggcantggaatttgccaactgaaacaggaagtatttggataaattgaaggtatgggatgatggggtatgcctgggttgtaggacatggaagacgtnagtctggggcctgcttaagttcatccctnaaaatgtcttgcctagggaccactgtgattttntaataatatcccttaattctactctagatgatatcttttaaagaacctttactttttgaaaaaagtaaa

SEQ ID NO: 1167 - DNA, 410 bp, Homo sapiens
ccctttcgagcggccgcccgggcaggtacagtcaaatgcagaaggcattgtattagctttttgctgcgtgtagttgaaaaggtttggaggtttggaggtcgttttctggccggagaatacataattcttgggaaaatgagctggaagataatgagaatctaccttatttctctgcacaggaagatcagtctgcctgcagttagctaatctccctgaaccttgctcactacatcaggagaccataaagcaaaagggtaaatcaacagttcctttaagacactttatccaaaaggattctcctttcttgcctgtaactctgacaaggacagtgagggtgaacgctccaactgtcactgttcaggaaaaggccagcttatcctgcagcctcagcttcctgggcggatgatccc

SEQ ID NO: 1168 - DNA, 396 bp, Homo sapiens
ccctttcgagcggccgcccgggcaggtacagattaaataggttaacctttatgtgggtaaattatatcaataaagctgatgaagaactggtagatgacaagtgtaatataaaggcaaccataaatacaaaatacaggaataagcaatttacttagaagataaaaaagaaggcttctggccaggcgcggtggctcacacctgtaatcccagcaccttgggaggccaaggcaggcgaatcacaaggtcaagagagatcgagaccatcctggccaacatggtgaaaccccgtctctactaaaaacacaaaaattagctgggcgtggtggcgcacgcctgtagtcccagctactctcgggaggctgaggcagaagaattgcttgaacccgggaggcgggg

SEQ ID NO: 1169 - DNA, 334 bp, Homo sapiens
  misc_feature 292, 320: n = A,T,C or G
cccttagcgtggtcgcggccgaggtacatgcctgtaatcccagctactggggaggctgaggcaggagaattgcttgaacctgggaggcagaggttttagtgagctgagatcccgccattgcactccatccagcctaggtgacagagcgagcgagactccatctcaaaaaagagaaagaagaagaagagagctcaacaatgcagccagggaagatttcctgtaggagtcttgagacaggagaaagagagatggaagagaaagaaagcgcatgctgcctcttgaaaaaatgganagatcacccccgcgtacctgcccgggcngccgctcgaaaggg

SEQ ID NO: 1170 - DNA, 391 bp, Homo sapiens
ccctttcgagcggccgcccgggcaggtacagtggagccaagattagatccaggggacctggtttcccagccccatcacctcagtcctattgcattaccctctggaaatgctcagtccagtaaaggagagagtgatgatgcaatgatgtgactgcttccagtgaagagtaaaagtaatgaactagaaacgggagaaacagattgacacccttgagttgtctttctggttagggcttttgggtttttgttctgtaatacagtccaatgtggtggccattcaagggagaaggaccactcatcagccctcctgctccctcacccccatcttaattaaataagcctccttaggatctcacacacctgcatgtaacaaaacaggttttaaaaatctg

SEQ ID NO: 1171 - DNA, 411 bp, Homo sapiens
  misc_feature 307: n = A,T,C or G
ccctttcgagcggccgcccgggcaggtacgttgtcttgtggaaattttagagttgcttccttatttagggaagataatttactcaactccctttgaacacgtttgctaattccatttaggttttattccagtaaacaatagaattgaccctagttttactaatcatattaaatttttatatcttaattataatccagagagtatccgctggctaacctaatctgaaaattaactaactcgtggaggaatattcaagcattcggatagttttaaattcaactgtgctaatacaaaaaaaaattagctnggcattaaaaggttagaggaggatatgtttgtaaaactaaatggaccgatgaaaacctggactttatatcatagaagaacagagtgaaggtaaattgcactgcc

SEQ ID NO: 1172 - DNA, 389 bp, Homo sapiens
ccctttcgagcggccgcccgggcaggtacttactttgattcctctagtgcaagattatagtggggttatacctgagacttcaataaatgtttgactaactaaactaaaatagcttagggtaaggactacttccccaaacgcccttttaaacatgtgagaaagggaatctccctgacatactggtatggccatttgtagcaatatactgagagtgacttgggtgattttctggggcgatcaaccacattccatgagcaggttaactgtggaagacacctgcccttgagcatcgcgtttgggccacatgcgtcaatggggaaatttgtgtttccattctgcttcttgttttgccttcacaacttcagggatagaagcgtattccattttta

SEQ ID NO: 1173 - DNA, 395 bp, Homo sapiens
ccctttcgagcggccgcccgggcaggtacttttctttatgaatgttataccagaacttaggaggaaaaaatttttgagcatactgaatattaggaattggatatctccctaaattattaaagttcatcttccataaattctgtaaaactgaatgtagtatttccccctcttcccatgcaagtaactgatatcactttagaaaacctgatatgaacattatttgttattgtgcttttatgaagaattctgtctaatcttctcataagaagaaagaattagaaccaaaaatctaattatcagatttagtaagatgtaggcaagatccacctatttttttcatttatgtctttcaaaatcaatcacattctattattcaccgatccactaaacagatg

SEQ ID NO: 1174 - DNA, 222 bp, Homo sapiens
cccttagcgtggtcgcggccgaggtacgcggggaattgctaatgggaatggggtttattttgaggtgatagaaatattgatgaaattagaaattggcggtgattgctaatgggaatggggtttattttgaggtgatagaaatattgatgaaattagaaattggcggtgattgctaatgggaatggggtttattttgaggtgatagaaatattgatgaaatta

SEQ ID NO: 1175 - DNA, 461 bp, Homo sapiens
cccttgcactgtgacaagctgcacgctctagagtcgacccagcaatctccctgctgctccgtcgtccgccaggacgtgaagcattcccgggcgacgttttctacctccactctcgtctgctggagcgtgctgcacgtgttaacgccgaatacgttgaagccttcaccaaaggtgaagtgaaagggaaaaccggttctctgaccgcactgccgattatcgaaactcaggcgggtgacgtttctgcgttcgttccgaccaacgtaatctccattaccgatggtcagatcttcctggaaaccaacctgttcaacgccggtattcgtcctgcggttaacccgggtatttccgtatcccgtgttggtagtgcagcacagaccaagatcatgaaaaaactgtccggtggtatccgtaccgctctggcacagtatcgtgaactggcagcgttctctcagtttgcatcc

SEQ ID NO: 1176 - DNA, 445 bp, Homo sapiens
cccttcgagcggccgcccgggcaggtaccagaggaggagatggacgatcagagccatgcgcctgtttcctgcaccccctgcgcactggttctatggccacaaggagtcttacccagtaaaagagtttgaggtgtatcctgagctgatggaaaaatacccatgtgccgttcccttgtgggttggaccctttacgatgttcttcaatatccatgacccagactatgtcaagattctcctgaaaagacaagatcccaaaagtgctgttagccacaaaatccctgaatcctgggttggtcgaggacttgtgaccctggatggttctaaatggaaaaagcaccgccagattgtgaaacctggcttcaacatcagcattctgaaaatattcatcaccatgatgtctaagagtgttcggatgatgctgaacaaatgggaggaacacattgcc

SEQ ID NO: 1177 - DNA, 300 bp, Homo sapiens
actgcagctggtgggtcaccaggacgaccgtcttccccctgagtgtcttcttaatgcactcctcaaaaatgtgcttccccacgtgggcgtccacagtagacagggggtcgtccagcaggtagatctgacggtcggaatagacggcgcgggccaggctgatcctctgtttctgccccccagagaggttgaggccccgctctccaatctctgtcatgtctccaaagggcagaagttccaggtcccgattcagggagcagcagtggagcacctggaggtatcgggccttgtcatacccgcgta

SEQ ID NO: 1178 - DNA, 175 bp, Homo sapiens
actgaactgggaggtttttagtctgatagccacaattttgacctaggcaggaagctttacagcttgaggcagtttcatggtctgaagacaaacttcttgtgacttgctgccggtgttggactgcaggagagagcctcactgggtcaggagcacgagaacaaagtggatcccacta

SEQ ID NO: 1179 - DNA, 305 bp, Homo sapiens
  misc_feature 1, 7, 9, 160, 162: n = A,T,C or G
ngggggncnttagcgtggtcgcggccgaggtacattggtatgagggtattactgggaccaggcaggccaattcgtgggcacccaggtggcctgctcaaatactggtagtggaatcagtggattgagcagatgagagggttcttgagtcactggataaccngngtgatgtgggtgatggtagtagtgggatgatcctctggggcccaagtgttgcacactgatgttgacactggctacagtgcacggtcaccagccagagtcccagacacacaactctcaggttcttccactctctgtgacagggg

SEQ ID NO: 1180 - DNA, 475 bp, Homo sapiens
  misc_feature 11, 343, 361: n = A,T,C or G
actgaaaaatntcatgtcctgggaaacccctcagtcctgggcaaactgagaccggtggttatcatacaaagagaaaaccaaataagactaaaattatgtccaaacactttcattgtggctaggaacacaagttgaacaccctaataaggaacacaaataataaaagcttgcattattgagtgcttatatggggtaagtattatactattatctccattttaaagataagcaaactgagacatagtaagggtaaataagttagttagtgaaggcaccagaatttaaacccagaaagtttggttttagagcatacactacaatcagcactgtatggaaagatatntaagagcagagacaggcngagatgggagcactggggaagacatcatggaggggctagatggctacatcttggctttaaaaagtgagcaaaagtaaaagttagaaaggagatgaaagtatcatttataaatgg

SEQ ID NO: 1181 - DNA, 327 bp, Homo sapiens
ccctttcgagcggccgcccgggcaggtactgaaaaatctcatgtcctgggaaacccctcagtcctgggcaaactgagaccggtggttatcatacaaagagaaaaccaaataagactaaaattatgtccaaacactttcattgtggctaggaacacaagttgaacaccctaataaggaacacaaataataaaagcttgcattattgagtgcttatatggggtaagtattatactattatctccattttaaagataagcaaactgagacatagtaagggtaaataagttagttagtgaaggcccagaatttaaacccagaaagtttggt

SEQ ID NO: 1182 - DNA, 594 bp, Homo sapiens
  misc_feature 557, 567: n = A,T,C or G
acaaccctaccactactctacatcatggaagtcttaacgatttagggtaatacgataatgagaataccaatatggatctattaaatgaggagctgagtaagctccaaatttccctctagattggtaagtctataatttattatatgaaattcctaattattaccatactaagttcaaaagattttaacccaaatcctttagtaactgataaacctcattcttaagattcttgacagaaataatcttgatgagcttcttctcttcatgatctttccaatgctgttataattttgagggaattactcttattttcattaattctgttgcaaggaggaaaagactgactctgtgttggggtttcttttctctataaggcacaagacctaaatgtcattgaagaagtgattcgaatgatgttagagatcatcaactcctgcctgacaaattcccttcaccacaacccaaacttggtatacgccctgctttacaaacgcgatctctttgaacaatttcgaactcatccttcatttcaggatataatgcaaaatattgatctnggtgagtgtnaatgaagacatttattatgaatctttt

SEQ ID NO: 1183 - DNA, 267 bp, Homo sapiens
acgctaggccgcggccttcttttctcccagaaaggtgaccctccccaccctgcgtcctgctccttccgtccatactgatgtttgttttgctggaggccagtagcaactggacagtagctctaggggaggagaatccacctgcggcgaagggtgggatttgttttctttgagccttctccagtgtggggcagctggcgcatctccacttagcgccgggggtccgggatcctacatcgcagggactggggatctcctgggttctgtacc

SEQ ID NO: 1184 - DNA, 534 bp, Homo sapiens
cccttagcggccgcccgggcaggtacagagctggaggcccaaacagccagccaaatcttgctgtattttatccaccatagtataatccagagactgtggaccccaaattgggatgcttttaaaatccaaagtagttctgtatacacatttgaagaaaaatgctgttgaagaaatgtatccataaaacacttcaggtcaaaaagcaaaagaatatcaagaaaaagtttaaataacatgattcctactggttttagatcataattatcatcctatattatttatattcgtatcactgttatctttctctgacaaataattctgaaatacaatacattttaaagttatgcaggattttaaagacctcgtcttcaagcaaatacaagaagtttaataacaaactttaaataaatgctcatttaaataaaagtttatttttctcctggccaaatatttggtgaattacttacaaagatactttcaatgattagattccttagcttaaaaaaaaattcatttgaatacgctttagcccaa

SEQ ID NO: 1185 - DNA, 680 bp, Homo sapiens
  misc_feature 487, 527, 541, 549, 560, 597, 604, 633, 637, 654, 660, 665: n = A,T,C or G
ggtacctgaagcctctgtctgactttccagttggaaaggacatgcttttgtttcccaccgactgtttaatttttttggctgcaatgcatttcttgccagacggggtctgtttatttggatcaaactgagaagaaactttggatttgctgtttccagcaaaagccttgaagtctgactggctgtagtcgtaaggcgtaaactctttttctggtggctctgggtcctttggcttcttggaaattttgagtcgtttcttctcttgtttctgttctgtggtccttgggtcgcttgttgctcgctctctcttctttgcagcattttctagctgtagatcaggaacagatgtgggggaggaacagggaggcacatgggaacagggaactccaccggcctcagcaatagctgggacccagctgcctaagtggtaagaagaacagtcagtggtggggagaggagctgtggctggaacttcgggaccaacactcanggtcagctgaaacaaattcctcactggacaatgacatgangtcatttaagaaangcaagccngccaggtgcantggcttcatgcctataattccaatgcctttgggtggnctaagtnggaagactgctttaagcaatctgaaacancccnggccaacataacaagancctatntttcnaaaaaaaaaaaaaaa

SEQ ID NO: 1186 - DNA, 618 bp, Homo sapiens
cgaggtacgcgggaattgaatgtcaactttagctgtgacttttctggcagctagaataaaagtaagatcgttgtctgatagaactgaatgtctcagtttattagaacaacaaaatactgtaatctttctcaaaacctacatggaacaaactggaacaagtatttcatgaaaaccaaatgaaaaataagtaaataaatgatttcatcaccactgtcaccaaaaacaaatgaattttttggataggaaaacatggctaagttggtaattgactgagacattggcctggtgtgttatctgtggttgtattttattaaacttatatttacagaaatggaaaaaaactaacttttcatacagtttggtgtattcatagcaaaatatgaatagaaatcacctctggaatcttgatgaacaaggcctttagtggttcattggtgtagaatgaatatcaatttagagaaataggtctataagtcaggaagtgatgcagaaatgtcataaggcttattcataatcacaacatttttcaaatttttccacgttaaatctgaaattttaatttctttgataaaaaatctggtatttttgattttttttacttttggtttgatttggaaa

SEQ ID NO: 1187 - DNA, 358 bp, Homo sapiens
  misc_feature 317, 320: n = A,T,C or G
cccttagcgtggtcgcggccgaggtacgcgggaattgaatgtcaactttagctgtgacttttctggcagctagaataaaagtaagatcgttgtctgatagaactgaatgtctcagtttattagaacaacaaaatactgtaatctttctcaaaacctacatggaacaaactggaacaagtatttcatgaaaaccaaatgaaaaataagtaaataaatgatttcatcaccactgtcaccaaaaacaaatgaattttttggataggaaaacatggctaagttggtaattgactgagacattggcctggtgtgttatctgnggntggattttattaaacttatatttacagaaatggaaaaa

SEQ ID NO: 1188 - DNA, 660 bp, Homo sapiens
  misc_feature 1, 623: n = A,T,C or G
nggagtcgaccccgcgtccgcttacatataatgcaacttatatgtaagtttcatcaacacagactgagtatataagttggctaaaagtaacaatacccatctaacagtacaatgctgtcagagacccaggctctttctggcttattgtaattcatttccttagcatgttgggttttatcttcattctgttcccttcacagttgtggaattcctgttgcagcttcattttttaaggacacaaggcaggaaaggggaagggcaactccacacgtgtctgtcttcttatcttgaattgcaaagctgtcccagtaccttaccacctacttgcttctctagcagattctcttccatattatttaagccactgggtcactccaggttacaaaggtagcggtatattgaaactttgaaatttcagcctccatagtaaagaagggcaagggagaaacggtgtttgtttagtcagtctaaattgtcaaaggagatagccagatatctctttttgagagataaacagacactcttcatttaaacatggtataacttggctttaaggcatatttctttaaaaatatattgtcaaggactgcgaagagcctgaagctactttgccatactttcanggctagcagaagacaggagaatatttggtcggggaaa

SEQ ID NO: 1189 - DNA, 219 bp, Homo sapiens
  misc_feature 4, 15, 19, 20, 21, 29, 31, 47, 48, 49, 51, 60, 61, 63, 73,76, 79, 82, 86, 89, 95, 100: n = A,T,C or G
gatngttttttgcanaatnnncccttttngngggggtgaggggccgnnngnacctaaaanncnttgttttaanacnatntgntgcnacnttttgncaaanccaaagaaacggcccttgtcgcccacgacacgtttgcgtaaggcgcaaagctggaaaagtgcaagtcctgtggctttccaaaaggcagcgggaggcattggtgccggtttatttttaag

SEQ ID NO: 1190 - DNA, 445 bp, Homo sapiens
  misc_feature 1, 2, 9, 28, 33, 66, 88, 89, 131, 139, 156, 160, 163, 201,219, 222, 226, 240, 270, 302, 308, 317, 327, 365, 410, 411,427, 432: n = A,T,C or G
nnagcggcngcccgggcaggtacccatnatgcncactgcaggcacaactccagatgaaggactatngaatatatgaatcggcaacgannatggaggtggtcctgggggtgattattgcagccatgggggcnctgcccancatctgagccaagggtnttgnaangagaatggagaagcttttttcagggggctcttgggacnatcagggcccccccatgntcncatntatgtcctcgcctnaaaaaaaacttttaccgttaagcttttagnagggctaacaagacctccttgcccttttgaantaaacnccttgaatntacttgggcnaataaccaaaggcctttttccccccaagggcttaaatngccccaggaagaaaacggttaaaccttcccttggcttcccttggnnggggcaaccttcgagnggggnaggccatttttta

SEQ ID NO: 1191 - DNA, 537 bp, Homo sapiens
  misc_feature 331, 513, 521, 536: n = A,T,C or G
cccttgcactgtgacaagctgcacgctctagagtcgacccagcatggatatgctgctgatgaaatcactcactgcatacggcctcaggacatcaaggagcgccgagcagtcatcatcctcaggaacttgcgatgttcttcaccgaggaagctttcgcagtagatcttatatgcgtcttccgtgcctgacggacgcgcggcgaaccagccgttgtcagtcatcactttcagaccgccaatagaagcaccgttgcccggagcagcagtcaggcgcgcggtgatcgggtcacctgccagggtgctggcgctcaccatttccggagacagcttanacagcgccgctttttgtgcggaagtcgcagctgcctgcaaacggttgtagctcggcgcaccaaagcgttttgccagttcgttgtagtgttcctgcgggttcttaccggtgacagcggtgatttccgccgccagcagacacatgatgatgccgtctttgtcggggggacacggcgtgccgtcnaaacgcangaaggaagcccctgnc

SEQ ID NO: 1192 - DNA, 579 bp, Homo sapiens
  misc_feature 129, 144, 169, 213, 222, 224, 226, 228, 229, 231, 233, 240,244, 246, 253, 257, 264, 267, 270, 274, 283, 289, 305, 322,328, 336, 339, 347, 383, 394, 406, 418, 432, 441, 446, 478,488, 501, 506, 508, 514, 517, 553: n = A,T,C or G
ccctttcgagcggccgcccgggcaggtaccactgggcttgcactgtgttccaggcggtagggtcttcaacagacactctgagaggtgggattgtagggcatcagtttctgcagacacactacaagtgtntggcaacactattgnggaggctaaagtaactccatctcanatgctaatccacaatgtttgatttctgagtaaccccaagttttnggaaggccncnangnncncnacctttntctntnggggccnctgnaataaancanccntgtnggccagggnttgttnttttacaatttggttnttaaaaggaaaaatacntggctngggggccnccngttgggcntcattgcccctggtggatccccaagccaccttttgnggaaggccaantgggcaaggggnagggatccaatntttggagggtcacngtaggtttnaaagnacccaggccctggggcccaaacattggggtgnaaaaaccccncaattccttcttnacccnanaaaaanttnaccaaaaaaaaaaacccacgccttgggggccgtttnggtgggccgggggttggccccttgga

SEQ ID NO: 1193 - DNA, 401 bp, Homo sapiens
  misc_feature 19, 321, 347: n = A,T,C or G
accactgggcttgcactgngttccaggcggtagggtcttcaacagacactctgagaggtgggattgtagggcatcagtttctgcagacacactacaagtgtctggcaacactattgtggaggctaaagtaactccatctcagatgctaatccacaatgttgatttctgagtaaccccagttttgggaaggcctccaagttttctactttatctattgttccttgtataagagcatgtggcaggctgttcttacattgttataaaaaaaatacagctgggcgcggtggctcatgcctgtgatcccagcactttgggaggcantggagggaggatcatttgaggtcacnagttcaagaccagcctggccaacatggtgaaaccccatctctccaaaaatacaa

SEQ ID NO: 1194 - DNA, 725 bp, Homo sapiens
  misc_feature 2, 8, 37, 79, 134, 147, 161, 196, 208, 219, 223, 226, 234,237, 247, 256, 264, 265, 275, 278, 283, 299, 304, 306, 308,313, 322, 348, 350, 361, 364, 373, 385, 391, 423, 427, 432,441, 450, 491, 555, 563, 567, 579, 596, 601, 632, 638: n = A,T,C or G
  misc_feature 649, 660, 669, 707, 708: n = A,T,C or G
anaattcncccttagcggccgcccgggcaggtacaanacttggccgaaatctgtcaggtcagcccaactttccttgtcngtgtcaaatgctgtgcctctgtcctatcaccgggagaaaaaaatgggttcattgnggacgccctgccnagtttatttgtttngtctcggggtggggaatttataccctttttgggtntccaaatctttnatatgaaaaangggntcncccattcnttncaaccggacnttttcctgngggcaatnnttaaaaaaanacntaatntaatggttcctattgngcctntncnattgnattgccctngggtcgccttggggtataattccctngntggccaatttnggnggaccttgntccttggtgganagaacntaattttggttggtggccaaccaattattttntttncctancttaaaaanttggccaangaaaaggaattttaaccaaggggttggggccaaaatggggnaccaaaaggttttttccttccttccttggccctggccattcccaaaccttggccaaaattcctnaattggtntttnaaccaattggtnaatttcccctttttttnacctnaccttaattttttttttccaaaaaaacccanaaaggnaatggttaatnggggccttttnattttttcnaaaaaccaatccaatttttttaacctttttggggaatnnttaattggggccggggg

SEQ ID NO: 1195 - DNA, 525 bp, Homo sapiens
  misc_feature 324, 395, 447, 462: n = A,T,C or G
ggtacagctgggatttgaacttggcattctagctccagcatccatggccttaaccaccatgctgtcctttctcattttgattgaataggctaatacattccttgtccttagaatagagtcttgcctgtagtaagtgttcaggtggcagctttagggctctcacttatcccattggactgggagtcaggcttgatgcttccactaagtatcacacaaccttggcaagattcttgtgccccggtgaaatgaaagggttggacttgggggcctcaagtccagcccgcactgcatcctgatcttctctctccatgccccatcacctanacccatccactgtggaggacaagtgtgagaaggcctgccgccccgaggaggagtgccttgccctcaacagnacctggggctgtttctgcagacaggacctcaatagttctgatgtccacagtntgcagcctcagctanactgtgggcccaggggagatcaaaggtgaaggtcgacaaatgttttgctggggaggcctgggg

SEQ ID NO: 1196 - DNA, 556 bp, Homo sapiens
  misc_feature 509, 530: n = A,T,C or G
ccctttcgagcggccgcccgggcaggtactgtgtgacaatgacctggatatggaagcagaagggagcttctaaggaccggaagctgagagtctgtctcctgtcccggcccggacactggggttcaggaagtttaagaacagacactgtcttgacaggaaccagagcctcagtgtctgcaggagttgctggctgtttcctgatgcagttggagcagaatgggatgtcctgggacaacagaaatgtttacccatcttgactagtgtggtcatctgaagaatggcctccaaagacatcctgagaacctgggaatgttgcatggatgaaggaatttgcaaaagtgattaagttaaggagcttgaaatttgtggatcatgctgggttaccccagtgagctctaaatgtaatcacatgtgtctttatgaaagggaggcagagggagatttgcagacagatgaggaggaagatgagaaaacaatggacacaagaaagaaaaggtgatgcagttcanggacccaaccaataaaatgangtgacctccagatgcttggagaaggg

SEQ ID NO: 1197 - DNA, 402 bp, Homo sapiens
cccttagcgtggtcgcggccgaggtactttgctacacggccgggggccattgagactgccatggaagacttgaaaggtcacgtagctgagacttctggagagaccattcaaggcttctggctcttgacaaagatagaccactggaacaatgagaaggagagaattctactggtcacagacaagactctcttgatctgcaaatacgacttcatcatgctgagttgtgtgcagctgcagcggattcctctgagcgctgtctatcgcatctgcctgggcaagttcaccttccctgggatgtccctggacaagagacaaggagaaggccttaggatctactgggggagtccggaggagcagtctcttctgtcccgctggaacccatggtccactgaagttccttat

SEQ ID NO: 1198 - DNA, 326 bp, Homo sapiens
ccctttcgagcggccgcccgggcaggtacgcgggagttttaatttttccaaagtatcatatgaatggaatcatgtgatatgtagcccatgaatcatgtatatgggtttttcacttagtagagcacatttaagattcatcattgttgctatgtgaatcaatagctggttccttttatctctccgcagctcctactgcactgagaagcacgtgttctccatttccctgggggagaccattgtattgggcagtttggaacaaaacaccatggactgggaggcttacacaacagaaatttatttcttgctgttctagaggctgggaagct

SEQ ID NO: 1199 - DNA, 407 bp, Homo sapiens
cccttagcgtggtcgcggccgaggtactttgctacacggccgggggccattgagactgccatggaagacttgaaaggtcacgtagctgagacttctggagagaccattcaaggcttctggctcttgacaaagatagaccactggaacaatgagaaggagagaattctactggtcacagacaagactctcttgatctgcaaatacgacttcatcatgctgagttgtgtgcagctgcagcggattcctctgagcgctgtctatcgcatctgcctgggcaagttcaccttccctgggatgtccctggacaagagacaaggagaaggccttaggatctactgggggagtccggaggagcagtctcttctgtcccgctggaacccatggtccactgaagttccttatgctac

SEQ ID NO: 1200 - DNA, 378 bp, Homo sapiens
  misc_feature 351: n = A,T,C or G
cccttagcgtggtcgcggccgaggtacgcgggggagacacattcagaggtgagcccagagcgggtaaagtggactggggagaacttcggaggatgttcatgtccaggagcagccccacgccctgtatggtcggtgtctagagcctcacagcaactaagaccaacccagctctcagaagaaggaatgtcaaaatgtcatgttcaattttacattcagtgcctggaatcttttcttcacaattgaaatgaaatgtgctgaaggaggtgaatccatgcattaatcttcagctcacaaaggaaatctacataagaagcaaggaacacgcaagagatctacagctctgatctccangatagtgaaatgaggtggtgaatgata

SEQ ID NO: 1201 - DNA, 374 bp, Homo sapiens
caggtacccttcacaatacattggcaaattctgaagctacaaagcacaagagaccagaaagccaagtagaaagctatgaaaaaccatttttaggaagctagtattagagttcaagacccagcagtgaggacaagaggcttttggtgactgtctggggatttcatttggaaagtctggagattggtgccttttaagaagggacaaaactaagggtaagtgaactttggttctaggaatggcaagatcagcaagaagatcaccattgccaactgtagcctttacacaatgtcatagcagcccaaattcagtcagctattgaattaagtttattgtctacttgccaagctaaagaatgtatgaatgctgtctttaga

SEQ ID NO: 1202 - DNA, 399 bp, Homo sapiens
acttgcttggtctcccctccctggaaacgttctcaaattggtaagaaaggcaattacagggctcagctcgtttgtttcccacctgtcaaagcactgtccttcattgtctgatgtccagtgtctcaataccattgtcttcttatttatctggattctggggttgtttcaggtgggagggtaaatttagtccctgttactccatcttgactgaaagcaaagtccagttctttagtttgttctccctatgacagacctcaatccctccgaatgatggttagatgacttcctattggtttttctattggcaagatggtgaaccatgggtcaccttcctccatgacaccctgactgagttacctctaatatatgcagaattctgctgtatgtagaaaaattaat

SEQ ID NO: 1203 - DNA, 392 bp, Homo sapiens
actgaaaaatctcatgtcctgggaaacccctcagtcctgggcaaactgagaccggtggttatcatacaaagagaaaaccaaataagactaaaattatgtccaaacactttcattgtggctaggaacacaagttgaacaccctaataaggaacacgaataataaaagcttgcattattgagtgcttatatgaggtaagtattatactattatctccattttaaagataagcaaactgagacatagtaagggtaaataagttagttagtgaaggcaccagaatttaaacccagaaagtttggttttagagcatacactacaatcagcactgtatggaaagatatctaagagcagagacaggcagagatgggagcactggggaagacatcatgga

SEQ ID NO: 1204 - DNA, 381 bp, Homo sapiens
cccttagcgtggtcgcggccgaggtacctgacatggtgcccaaggactgggagtagaagcagaatcccatccacctccacctaatcatacggagaaaggagacaggagctgagggagggcagtgctatgtccaagctgtcagcaagcagtaggcagagcccagacccctgctttcccatgcccacccctccccagttcagggcaaggccacctctccagggcctttccctcccctagagaggaaactccccaagttcctctgaccagacaggagaatgaaccaagagaagaaaattccacttaacacacacacctggagcctgaggctgaaagctggaatcccagactttgacactcaagaaggcatctccacactttttc

SEQ ID NO: 1205 - DNA, 417 bp, Homo sapiens
ccctttcgagcggccgcccgggcaggtacagctaactgtgctaggcagggcagccctgtgagttctactgctgtcttggttttacagagggggaagtgaggcacagagaagttaattaacctctgaagtgttgcagtctaaggcacagaggcacagttccaggcaaggttcatctgaatcttaagtcctcactctttgccaccatcctccactgctgagaccatccctgtgagtcctgccgctctcctcccctggtccatattcactgctactcaatgaggccaaggaagccaatggtcgtgtccccaagaggatatctctcccctcctgagaatctttctcatacatctcaattctgagatacagattgagaagcacctcagcaaatccactgcatggaaggcaaaacaaccttga

SEQ ID NO: 1206 - DNA, 425 bp, Homo sapiens
ccctttcgagcggccgcccgggcaggtacagtcagggttttgtcatgttgtttaggctggttttgaacccccggactcaagcaatccacccaccttggcttcccaaagtgctgggattataggcatgagccactgcacccagccaattctccaaatctcacagccaaactgcaactaaattccatctcaaacaaatattcaaatgcagaagactcacccatctaatcaaggcagttttaatatttaggggaaaaaaaatgcctggataaaactgtaaaaccaagcatgatagaagagatacttttaggaatgggggagggatgacaaaaataaaacgagaaggtagataagaatggaaagaatactagaagacagcctgccatgaggttatattttaccaggggggtgatgggtgcacccaaatc

SEQ ID NO: 1207 - DNA, 383 bp, Homo sapiens
  misc_feature 235, 238, 245, 265, 273, 274, 290, 291, 292, 297, 318, 330,347, 370: n = A,T,C or G
cccttagcgtggtcgcggccgaggtacaaggactacaggtgtaatcctccgtgcctggcctgatgttttttacattaatagagcttataactcataagaattatgttagtctggtgtatattctgtttccttcctgctcctggagaaagacaatcattttggccttgaataatttcttagaaatgcagatgtaaaatttaaaatacacacacacacacacacacacacacacacnctntgttcanccaaaacactagcaagcctntaaaagtnngccaactgacatttgnnnatatncctcaccactctattgcaaanatgaagaaacangcttattgacattttanatggctaaactaactatgagatntagggcttctcta

SEQ ID NO: 1208 - DNA, 487 bp, Homo sapiens
ccctttcgagcggccgcccgggcaggtacgcgggagttttaatttttccaaagtatcatatgaatggaatcatgtgatatgtagcccatgaatcatgtatatgggtttttcacttagtagagcacatttaagattcatcattgttactatgtgaatcaatagctggttccttttatctctccgcagctcctactgcactgagaagcacgtgttctccatttccctgggggagaccattgtattgggcagtttggaacaaaacaccatggactgggaggcttacacaacagaaatttatttcttgctgttctagaggctgggaagctcaaggtgctggctgcatattcattctgaggcctcttctgatgtgcaggcagctgccttctgacttgtgctcacattggagagagggagtcagctttggtgtctcttcttgtaaggacactaaccccattcactagggccccaccctcatgacctaatcacc

SEQ ID NO: 1209 - DNA, 443 bp, Homo sapiens
ccctttcgagcggccgcccgggcaggtacgcgggggttcgaggttcgtttacgcgccgcttcgccgtgcaggtggtggcgaagcgctcctccgaaaggtttcggaagctggtggtagctctgaagataacgctgcgttagggcatactgcggcggaggatggaactccgattgaaagcagttgctggagtggagcacgaatttcaacaagccgcatgttgaagtgtgaggcgtgaaagggtatgtctgatatttgctttaaaatgctccagcaaagaaattaagggatggatgaagcaaaagagccaggtatggtggctcatgcctctaatctcagcactttgggaggccgaagcaggcagatcacctgaggtcaggagtttgagaccatcctgaccaacatggtgaaactcgtctctactacaaacataaaagaattagctg

SEQ ID NO: 1210 - DNA, 479 bp, Homo sapiens
  misc_feature 104, 107, 108, 110, 118, 128, 153, 164, 175, 176, 184, 189,209, 215, 216, 233, 240, 242, 243, 267, 281, 304, 310, 313,316, 325, 334, 335, 336, 344, 354, 358, 359, 363, 377, 381,386, 388, 394, 396, 398, 399, 400, 401, 406, 410, 413: n = A,T,C or G
  misc_feature 425, 426, 430, 441, 454, 467: n = A,T,C or G
atttgggcggtcaacgcgggtggagaggcccatgtggacgttcacgggatccacttccgcaaggaccctttggaaggccgggtgggccgaaaacttaggactantgnncntgaaactnccaaatcctnccgttccaaacccgtgaagggaccnagatcctgtantcaaacttganncggtaccnccggnggggttcccgggccgtttancattcnntcccgtgccgcacccgncccgggngnnccaaaattttggcaatttctttcncttgaaagtaaatnattgaagcttttttccaaacttncttgantgnagncctttgtgnataaccccnnntaaccttngggggcgggntaanncacnacttaaaggggcgngaanttacnanaccccncntnnnnttggncccnttntcttaatttgtnntttnggaaaaaaccngaaatgttggaantccctttgattcnaaaaaaaaaaaa

SEQ ID NO: 1211 - DNA, 449 bp, Homo sapiens
ggtacactgagcctagaatatcttgtggggtcaaaaggtaaggcagtgctcaaaaaacaacagtaaaatggcaaaaatacatagaacccaacttgaagggcatcctaatgtaaaatctagaaaaatctgagcacaaaatgtattatagtcatgggttataaccaatataatgagaatccaagagtccagactgatttttaaaaaattgcattttttcaatataaaagaaaatatcttccttatagtaacattttaattgacaaatgtagaagtaatgatggaagtagaaaatcactgtttggcacacactgtagtaataactgtttcagacaagaattatccacgaatgctaaaattagtttggtgaaagtatgatgagaaacaagatacttacataggtccaaagcatctcctgacaagatacttattcattcacagaaaaaaaaata

SEQ ID NO: 1212 - DNA, 399 bp, Homo sapiens
  misc_feature 309: n = A,T,C or G
ccctttcgagcggccgcccgggcaggtacgcggggactcctcacccagcatccataaaagcatgctgcacctttggcacagcgcgacttccctggccctccccctgcggaccagtgaacctcgcccgagggctcaataaagaagatttttgccctctttttctcacctctcagccttattgatccatggtgcccttccattgcctttcattggtgccgaaacccgggaggggacacctcctaagcccccccagaggctcagggggactcccctcctggtcggatcagtcctctccctcaatcaggtcangcttctcctccacggccatctgtccatttcgtccggttacttgctgccaggtcgcagttgctgcagctactccagtccaattcggccgac

SEQ ID NO: 1213 - DNA, 380 bp, Homo sapiens
ccctttcgagcggccgcccgggcaggtactttgctacacggccgggggccattgagactgccatggaagacttgaaaggtcacgtagctgagacttctggagagaccattcaaggcttctggctcttgacaaagatagaccactggaacaatgagaaggagagaattctactggtcacagacaagactctcttgatctgcaaatacgacttcatcatgctgagttgtgtgcagctgcagcggattcctctgagcgctgtctatcgcatctgcctgggcaagttcaccttccctgggatgtccctggacaagagacaaggagaaggccttaggatctactgggggagtccggaggagcagtctcttctgtcccgctggaac

SEQ ID NO: 1214 - DNA, 389 bp, Homo sapiens
ccctttcgagcggcgcccgggcaggtacatcggtcccttgaccattacacccacggtggccctaattggcctctctggtttccaggcagcgggggagagagccgggaagcactggggcattgccatgctgtaagtggaaacatctcccctcatcccaccactgcggggcagcctttaggaacattcacagacttcaggagataatgtttttcaataataagaatggtctgacagtttcaactttatttgcttcgtgctggggaatagttgaagggtttttgacccagagtttgggaagtgacatatagttgacgtattacaaagacagacttagcagcaatatgaagagggtggattgtaagtttttaagctttggtagtggggtaagg

SEQ ID NO: 1215 - DNA, 320 bp, Homo sapiens
actgaaaaatctcatgtcctgggaaacccctcagtcctgggcaaactgagaccggtggttatcatacaaagagaaaaccaaataagactaaaattatgtccaaacactttcattgtggctaggaacacaagttgaacaccctaataaggaacacaaataataaaagcttgcattattgagtgcttatatgaggtaagtattatactattatctccattttaaagataagcaaactgagacatagtaagggtaaataagttagttagtgaaggcaccagaatttaaacccagaaagtttggttttagagcatacactacaa

SEQ ID NO: 1216 - DNA, 354 bp, Homo sapiens
actttgctacacggccgggggccattgagactgccatggaagacttgaaaggtcacgtagctgagacttctggagagaccattcaaggcttctggctcttgacaaagatagaccactggaacaatgagaaggagagaattctactggtcacagacaagactctcttgatctgcaaatacgacttcaccatgctgagttgtgtgcagctgcagcggattcctctgagcgctgtctatcgcatctgcctgggcaagttcaccttccctgggatgtccctggacaagagacaaggagaaggccttaggatctactgggggagtccggaggagcagtctcttctgtcccgctggaacc

SEQ ID NO: 1217 - DNA, 388 bp, Homo sapiens
cccttagcgtggtcgcggccgaggtactttgctacacggccgggggccattgagactgccatggaagacttgaaaggtcacgtagctgagacttctggagagaccattcaaggcttctggctcttgacaaagatagaccactggaacaatgagaaggagagaattctactggtcacagacaagactctcttgatctgcaaatacgacttcatcatgctgagttgtgtgcagctgcagcggattcctctgagcgctgtctatcgcatctgcctgggcaagttcaccttccctgggatgtccctggacaagagacaaggagaaggccttaggatctactgggggagtccggaggagcagtctcttctgtcccgctggaacccatggtcca

SEQ ID NO: 1218 - DNA, 427 bp, Homo sapiens
ccctttcgagcggccgcccgggcaggtacagtgccctcatcgaagctcctaaaacttcctgaaaaaaatgaagctttaacgtccagcttccactgcttaaactgagcacaggacgtgcacttggatagtaaaccaggtgtctcctcaaagccctaatatattcagcatctctatcaaaggcgcctttcatttgacttctttgttctggcaaagactctctccttttaaattttctttttttgtccttattcattgcaaaatattgggccagtttacccctattgggttcatgcagatggatgttttgcaaatgtaattttgtgtcctggactaaagactgcaaccagcctcggagtaaacgaaaatgcccactgcggatatctgacaccttccattcacaagcatctacaaatgagtcgatttccaa

SEQ ID NO: 1219 - DNA, 356 bp, Homo sapiens
acatgggcacctggctgtggctcatctactaccatattctttgttcttctagatccttcttggcttccatcttggcaactccaaaggcatggtggggaaaacagatgcagagatagatgcctatttctcctgcagtctctttcagcatagcaattaggcaagttatcaataagagtatataatctataacttatagtccacataaggcttcactcaatttgaaaaattgccagttctgtcaaatatgctaacactccaataaggtatttatgacacagaatctttatttttccatcagtatgtgctgaagctacagatgttgaaacacgaactaatcttgtggctgataaatgaat

SEQ ID NO: 1220 - DNA, 356 bp, Homo sapiens
actttgctacacggccgggggccattgagactgccatggaagacttgaaaggtcacgtagctgagacttctggagagaccattcaaggcttctggctcttgacaaagatagaccactggaacaatgagaaggagagaattctactggtcacagacaagactctcttgatctgcaaatacgacttcatcatgctgagttgtgtgcagctgcagcggattcctctgagcgctgtctatcgcatctgcctgggcaagttcaccttccctgggatgtccctggacaagagacgaggagaaggccttaggatctacttggggagtccggaggagcagtctcttctgtcccgctggaaccca

SEQ ID NO: 1221 - DNA, 364 bp, Homo sapiens
ggtacaggtcatggtgagcaggtgttctgagggaagacaaaggaaaagcagagggagtgttgacaattctgagcttccatatggcagacattcggggcctgttggcatggtcctcagagcagcaacaacagcatcaattgaggttcattaaaatgcagaatcgcaggttcatgtggacctactgaatcagaacctgcattctaacaacagttttcagtggttcttccgcacattaaagtttgaaaagcactggtctggaggaggaggctctacaaaagggttgggtattgaggagccgaaaagacaacctggaactgagattcccagggatgacctgaaaacaagcatttcaaaagctcagaaa

SEQ ID NO: 1222 - DNA, 355 bp, Homo sapiens
cccttagcggccgcccgggcaggtacagtatcctatattattcctattttaagatttaaagaaaaccctgaggtttagataagcaaattgctcaaagtcacgcaatgccatagtagtgttggagctatgattttccagaatctaagctcttagtcctgggaagtgcctagtgcccaaagaagaagactggaataaaataaggctgaatggtgtgtaagaaccaaataacaaaagccttgcagacaattttaaaggctgtgaatattagtctaagaacaataacaagcaaaaaaaaaaaaaaaaaaagttttaactggagatagtaacatgtgttttcttttctcttcttttcttt

SEQ ID NO: 1223 - DNA, 247 bp, Homo sapiens
  misc_feature 1, 5, 16, 21, 32, 34, 42, 43, 48, 55, 80, 82, 88, 90, 99,110, 129, 134, 161, 167, 172, 179, 180, 236: n = A,T,C or G
ntgtnatggatatctncaganggggcccttancntgatcccnncccangtacacngcaggtatctggctccaccacactnangaaccngnaggaggcanggagtggatantgtgtcaaggatgactganccctncttctgtgtaaaacaagttacacctanattcanaatanatgctgnngcaacataaaattataaaaattcactgtaattcacatcttggtgcctgggcaccantttttaaatgt

SEQ ID NO: 1224 - DNA, 181 bp, Homo sapiens
  misc_feature 5, 41, 43, 63, 68, 69, 73, 83, 85, 90, 127, 133, 142, 155: n = A,T,C or G
cggcntttgggcccaaccagcccgctcgagcggccgccagngngatggtttttgcagaggggnaaacnncgcncccccggccnangtacntagagcctgagttgctccacaggaatccaggaactgngcacangaaaagganctcagctggtggngtgggaagatggaaaccaacttctcc

SEQ ID NO: 1225 - DNA, 414 bp, Homo sapiens
ccctttcgagcggccgcccgggcaggtacaaatattttaaatatggaaatcctaatgcagggggtgggctgagagagattttatagaatatatgtatgtatgtccaaaacagaagatacggaataaaaagcatgaaagaaagaagaggttccatagcaaggtatcagcagttcctcagggatgaggatggcggaggcatcaaggaatctcaagatgctaccaaaataggagcggaaacatggaaagatggaagcacatgtataattcaagtctgttcagcaacttgtgtgcctccagcctaaaagtaaaccacagtcatgttctaaaggttccgattcatacacatgtctgcttgttcttcagttttggttttgctactgggctttgattctttaatccccacctgctgaatga

SEQ ID NO: 1226 - DNA, 430 bp, Homo sapiens
  misc_feature 377: n = A,T,C or G
cccttagcgtggtcgcggccgaggtacgcgggaattgaatgtcaactttagctgtgacttttctggcagctagaataaaagtaagatcgttgtctgatagaactgaatgtctcagtttattagaacaacaaaatactgtaatctttctcaaaacctacatggaacaaactggaacaagtatttcatgaaaaccaaatgaaaaataagtaaataaatgatttcatcaccactgtcaccaaaaacaaatgaattttttggataggaaaacatggctaagttggtaattgactgagacattggcctggtgtgttatctgtggttgtattttattaaacttatatttacagaaatggaaaaaaactaacttttcatacagnttggtgtattcatagcaaaatatgaatagaaatcacctctggaatcttgatga

SEQ ID NO: 1227 - DNA, 400 bp, Homo sapiens
ccctttcgagcggccgcccgggcaggtactgaaaaatctcatgtcctgggaaacccctcagtcctgggcaaactgagaccggtggttatcatacaaagagaaaaccaaataagactaaaattatgtccaaacactttcattgtggctaggaacacaagttgaacaccctaataaggaacacgaataataaaagcttgcattattgagtgcttatatgaggtaagtattatactattatctccattttaaagataagcaaactgagacatagtaagggtaaataagttagttagtgaaggcaccagaatttaaacccagaaagtttggttttagagcatacactacaatcagcactgtatggaaagatatctaagagcagagacaggcagagatgggagca

SEQ ID NO: 1228 - DNA, 432 bp, Homo sapiens
cccttagcgtggtcgcggccgaggtactttactcacccttcctctgacagaaaaggatgaagtcaagggcctggtagaggcaccactaagaaaggcatctgaaaggaccaaagagagtgaccagcaagcattttttgcaaggctgaggagctgacagcttccatgaaaggctggaccacccagtggtgaaaagcatcatctgggttaccttgtgctgccataaaacacaccacagacttggtgacttaaaccacagatatttatcttctcacaatcctggaggctggaagtctgcaatcacggtgccagcatggtcaggttctggtgagggcctctttccttctcactgtgtgctctttcttgtgcatggagagagagagcatgaacaagccctctactgtccctcttagaagggcactaatcccataataa

SEQ ID NO: 1229 - DNA, 405 bp, Homo sapiens
  misc_feature 124, 266: n = A,T,C or G
ccctttcgagcggccgcccgggcaggtactttgctacacggccgggggccattgagactgccatggaagacttgaaaggtcacgtagctgagacttctggagagaccattcaaggcttctggcncttgacaaagatagaccactggaacaatgagaaggagagaattctactggtcacagacaagactctcttgatctgcaaatacgacttcatcatgctgagttgtgtgcagctgcagcggattcctctgagcgctgtctatcgnatctgctgggcaaagttcaccttccctgggatgtccctggacaagagacaaggagaaggccttaggatctacttggggagtccggaggagcagtctcttctgtcccgctggaacccatggtccactgaagttccttatg

SEQ ID NO: 1230 - DNA, 403 bp, Homo sapiens
ccctttcgagcggccgcccgggcaggtactttgctacacggccgggggccattgagactgccatggaagacttgaaaggtcacgtagctgagacttctggagagaccattcaaggcttctggctcttgacaaagatagaccactggaacaatgagaaggagagaattctactggtcacagacaagactctcttgatctgcaaatacgacttcatcatgctgagttgtgtgcagctgcagcggattcctctgagcgctgtctatcgcatctgtctgggcaagttcaccttccctgggatgtccctggacaagagacaaggagaaggccttaggatctacttggggagtccggaggagcagtctcttctgtcccgctggaacccatggtccactgaagttcctta

SEQ ID NO: 1231 - DNA, 344 bp, Homo sapiens
cccttagcgtggtcgcggccgaggtacgcgggggcagttcttgagttccacatgcagagcagatgcgacagctagaagtgagtggggcccagaccctggcccaggaagatccactaaaggaggccatccttccgccttcttctgcaggagtcaggatggaaaggcagatgtaaagtccctcatggcgaaatataacacggggggcaacccgacagaggatgtctcagtcaatagccgacccttcagagtcacagggccaaactcatcttcaggaatacaagcaagaaagaacttattcaacaaccaaggaaatgccagccctcctgcaggacccagcaatgtac

SEQ ID NO: 1232 - DNA, 411 bp, Homo sapiens
cccttagcgtggtcgcggccgaggtactgttgcagtgagctcaagtgttgggtgtatcagctcaaaacaccatgtgatgccaatcatctccacaggagcaatttgtttacctttttttctgatgctttactaacttcatcttttagatttaaatcattagtagatcctagaggagccagtttcagaaaatatagattctagttcagcaccacccgtagttgtgcattgaaataattatcattatgattatgtatcagagcttctggttttctcattctttattcatttattcaacaaccacgtgacaaacactggaattacaggatgaagatgagataatccgctccttggcagtgttatactattatataacctgaaaaaacaaacaggtaattttcacacaaagtaata

SEQ ID NO: 1233 - DNA, 425 bp, Homo sapiens
ccctttcgagcggccgcccgggcaggtaccatgtgcctgagatggaggtgtttgtggttgggcaggctggctttgctaattttaaatccaccaaaatatatcattttggcattgacaggtgtattagtctgttctcaggctcctataaggacatacctgagactgggtgatttataaagaaaagaggtttaactgactcacagttccgcatggctggggaggcctcagcaaatttacaatcatggtggaaggggaagcaaacacatccttcttcacatgatggcagcaaaaggaagtgctgagaaaaaggggaaaagccccttagaaaaccatcagatcccatgagaactcactatgatgagaacagcatggaggtaaccacccatgattccattacctgccaccgggtgcgtcccacaacatgt

SEQ ID NO: 1234 - DNA, 358 bp, Homo sapiens
ggtactgggtgggtgagtgggctcaaggcctcctgagtagcctgggtggcgtgggcaatgatggtaacagaggcaatgcaaagcttgtctccttcttgagctctgtgctcttgagtcggcagatgttgtaagggactgtgtagatcaacctttaggacaggaggtagcacctaaaagtgagaaccagctgtggtggtggcaatagagtttatgcttgacctttgttaatcgggagaagttcttgggcatttcagatgatgggtagggccatggaactctcagtagtcctggtcccatgatctgcctctgaaacaggaggggtgggatgtggtagtgggatccactttgttctcgtgct

SEQ ID NO: 1235 - DNA, 157 bp, Homo sapiens
ccctttcgagcggccgcccgggcaggtacgcggggacactttgctgccgaaacgaagccagacaacagatttccatcagcaggatgtgggggctcaaggttctgctgctacctgtggtgagctttgctctgtacctcggccgcgaccacgctaaggg

SEQ ID NO: 1236 - DNA, 702 bp, Homo sapiens
  misc_feature 158, 210, 236, 259, 307, 313, 348, 353, 376, 379, 397, 402,405, 409, 415, 418, 422, 434, 455, 461, 476, 477, 494, 500,509, 526, 566, 602, 620, 621, 624, 633, 636, 664, 677, 678,687, 693: n = A,T,C or G
ccctttcgagcggccgcccgggcaggtacaccttgttgggagagatgggggcagcccaagaaagctcctcagcggactgaagagggagtaagatgggctgaggggagcttgcagttcatgctgcattaggaagagggaagctcttcagtccaagtgcngcctgcaggggtgggaaaagcaaccaacaccggacacccgttcccacccttnaacccccccactgggcacaggggtcnccaccaaattctggggtcaaaangaaaattagggcgggggggccccctttgtggggtccattccaaaaagncggatncccaatgggttcttttggaggggcttggagggganttcantgttgccaagggccccatttagnggntggaaaaaaattggaaangaagncanttgnaaaccnagngggnaggggtggaagncaagccccccccattcccaangattgnccccggggggggganntaaaaggaaaggcttgnggccanccaagttcnggccttgggccggttanggggaaaaaaaacttggccttccccccccattttacccgntttgaaaaaggcccttggggattcttggggaaagtntcccttggaaagcccatnncantttttgccncanggggaaagaagggggccttgccgtttgnccggggccccacnnaggggaagnacttanccccttttc

SEQ ID NO: 1237 - DNA, 330 bp, Homo sapiens
  misc_feature 107: n = A,T,C or G
ccttagcgtggtcgcggcccgaggtactgatagtctgtctcgtttacgaagcccatctgttttggaagttagagaaaagggctatgaacgattaaaagaagaactcncaaaagctcagagggaactgaagttaaaagatgaagaatgtgagaggctttcaaaagtgcgagatcaacttggacaggaattggaagaactcacagctagtctatttgaggaagctcataaaatggtgagagaagcaaatatcaagcaggcaacagcagaaaaacagctaaaagaagcacaaggaaaaattgatgtacctgcccgggcggccgctcgaaaggg

SEQ ID NO: 1238 - DNA, 227 bp, Homo sapiens
  misc_feature 1, 89, 91, 102, 107, 114, 116, 124, 131, 135, 138, 142, 150,156, 165, 167, 173, 186, 208, 227: n = A,T,C or G
ngggcccttagcgtggtcgcggccgaggtacttttttttttttttttttttttttttttttttctttttttttttttttttttttttcnanccaacaatgtnttttnttatgtntncgggtttnaaaattntttnttnaatntctccatncccagncaaagggangngtgttncttaacatactgnaaattgcctaacttaatcattncctaaaaaaaaaaaaattn

SEQ ID NO: 1239 - DNA, 323 bp, Homo sapiens
  misc_feature 1: n = A,T,C or G
nggggcccttagcgtggtcgcggccgaggtactaggattacaggcgtgaagcagcatgccacgcctatagtgatatctttaagtaagcctctcctatcttttttgagcagtttttcaaagcaacaggcaccttattaaattagaaagttgatgtgcttggcctaatgcctactaatgaggtaaagaactaaagaacctctgtgatttcaatgaagtcccttcagatgttatgggctacttgttactgacaagtatggtaggaactgtaggtcaagctgtcataggcaaatagatcttgctgaagaggaagaattattggctaa

SEQ ID NO: 1240 - DNA, 376 bp, Homo sapiens
  misc_feature 26, 27, 28, 29, 42, 50, 58, 59, 60, 62, 64, 75, 89, 94, 95,97, 98, 104, 105, 106, 111, 119, 122, 123, 131, 132, 134,139, 141, 151, 157, 158, 170, 172, 173, 182, 188, 192, 193,210, 215, 220, 227, 236, 237, 241, 246, 250, 255, 258: n = A,T,C or G
  misc_feature 263, 265, 277, 285, 288, 290, 294, 296, 300, 301, 304, 306,308, 309, 311, 316, 317, 323, 326, 328, 331, 332, 335, 337,353, 357, 360, 362, 364, 370: n = A,T,C or G
actttttttttttttttttttttttnnnngaaaaaaaaaaantttttttngggggccnnntntnggggggggggnaaaaaaaaaaaagnttttnntnntggggnnnaaaancttaaaanccnngggggggnngnaaaangnaaaaattttntttttnnaaccaaagggcnannaaagggccnggggcntaannggggaaaaggggccccnaaaanccctnggggggnggggggggnngccnagggnaaanggttnttnaaaangncctttttttccnaggggcanggntntttncnaccnnggncntnncnaaaannaagggnttngnccnnaancntttttttttttttttngaanccntncnaaaaantttttt

SEQ ID NO: 1241 - DNA, 412 bp, Homo sapiens
  misc_feature 392: n = A,T,C or G
ccctttcgagcggccgcccgggcaggtactttaattagagacgagccagtgcagaatagctggacaggcagtgcgtccacccagcgagcagactgcccagggggggcagtctccacctcactgatgcaactggtgaagggacagacaggggcgtggatacatttcttccttccccaaaacaaaatgggaggatgcgtgtgggttggtgggttacagagaaagattcaaacatcattctggcctgatcagtattctggcagtttaccattatacatacagaaaaagaacagaaagtgtgttaaagaatccaagttttaaggggaacagaaaacaaagtcatctgcactatggaagcctatttttttctttctttgtttcccctcctttttctntctcctcctccttttttctt

SEQ ID NO: 1242 - DNA, 691 bp, Homo sapiens
  misc_feature 461, 501, 639, 650, 662: n = A,T,C or G
agtcgaccccgcgtccgccagatttgataaaactgcatgattccttaggaggaagtggaaccagatggacaaatagagccctcgtgtgattgtttcctgcaggaacaccagattgaacaactattcatgcaagaaaacaccttcgtaggagccaaaacaattagagtgatcacagtgcctgatctgaacataatattaaggagagaggaattgaagaggataggaaagacggtcttgcattgcatgcaccatccctccctcaaacccaagcagcagagcatggagagaaaatctgtgcttaagggagagagagcaaagcaagagtgggactcggtactgtcgtatcacagtggaacatagcaaagggcagaattctgctggcacccaggacaggagccttcagaccagccctggcccacagggaaattctgtgccccattgggaggaacccaagtcacagncagcttcaccactgactaactgaagtggcctgggacccanaataaatttgagtagcagtcatgccacaaggaccacagtcctagggcaagccctgctgctttgctgatctcaaaagcactggactttgagtgcaactcaatgcaacaccagagcccaagagactgcctgcatcacctnctccaattcangcagtacagctncaggagagactccttccacttgagggaaa

SEQ ID NO: 1243 - DNA, 386 bp, Homo sapiens
  misc_feature 95, 108, 109, 115, 116, 117, 118, 137, 138, 139, 140, 141,142, 143, 149, 150, 151, 156, 157, 161, 165, 167, 168, 169,182, 187, 188, 189, 192, 193, 194, 196, 198, 212, 214, 216,217, 218, 220, 222, 223, 228, 229, 232, 233, 234, 235: n = A,T,C or G
  misc_feature 236, 237, 239, 240, 241, 242, 245, 246, 255, 268, 269, 271,272, 276, 278, 280, 282, 285, 287, 290, 292, 299, 301, 303,316, 317, 328, 330, 341, 343, 346, 347, 351, 352, 357, 358,361, 364, 365, 366, 367, 372, 373, 381: n = A,T,C or G
ggtactttttttttttttttttttttttttaaatttttttttttttttttttttttttttttttttttttttttttttttttttttttttttttnggggggggggggnntttttnnnnaaaaaaaaaaaaaaaaaannnnnnngggggnnnccccnnccantttnannnggggggggggggnccccnnnttnnnantnttttttttaaaaanancnnncntnnttttnnggnnnnnncnnnnttnnaaaaaaaangcccccccccccnnannaaananangntgngnaananccccccncngnaaaaaaaaccccnnttttttaaaananggggggggggngnttnncccnnctccnngangannnnggccnncccccccnaaaaa

SEQ ID NO: 1244 - DNA, 428 bp, Homo sapiens
cccttagcgtggtcgcggccgaggtacatttctgttaaaaagaaggttgtctttccagccttatgttttgtagtttaatttgttcacattcattataatccattatttaatacatttttcttccatttgatcatattacttgctgataggaaggactgagttcattttcagcgtgtctggcttttccatttctgtggcctgggaaggtgggtggctacatcatcatccatggtctctgaaatatcctgtgttaccaaggcctgcttgttccaccaaactgctccataggcagttgtgacacccagaaagatgctgatatggtttggctgtgtccccacccaaatctcatcttgaattgtagttcccataatccccaggtgtctgggaggggcccagtgggaggtaattgagacatgggggcgggtttt

SEQ ID NO: 1245 - DNA, 388 bp, Homo sapiens
gcactgtgacaagctgcacgctctagagtcgacccagcaatctccctgctgctccgtcgtccgccaggacgtgaagcattcccgggcgacgttttctacctccactctcgtctgctggagcgtgctgcacgtgttaacgccgaatacgttgaagccttcaccaaaggtgaagtgaaagggaaaaccggttctctgaccgcactgccgattatcgaaactcaggcgggtgacgtttctgcgttcgttccgaccaacgtaatctccattaccgatggtcagatcttcctggaaaccaacctgttcaacgccggtattcgtcctgcggttaacccgggtatttccgtatcccgtgttggtggtgcagcacagaccaagatcatggaaaaaa

SEQ ID NO: 1246 - DNA, 273 bp, Homo sapiens
  misc_feature 53, 128, 129, 132, 133, 140, 141, 145, 147, 148, 161, 165,169, 171, 172, 180, 184, 186, 191, 203, 219, 221, 225, 232,241, 255, 262, 263: n = A,T,C or G
ccctttcgagcggccgcccgggcaggtactttttttttttttttttttttttnatttttttttttttttttttttttttttttttttttttttttttttttttttttttttttttttttttttttttnnaanngaaaccnntttnannaaaaaaaaaactncccnaaananntttaaacnttananccaanaaaaaaacccancatttaaaaatttttncntttngcccccnaaaaaaggnaaaaaaaaaggggncaaaggnnccccattttt

SEQ ID NO: 1247 - DNA, 449 bp, Homo sapiens
acagtaaggagcagacaagatggttctggccaagtggaaagcccatttgcataataagattagggtggggcgaccagccttcccacacacaatgtaaatgtcacacctgatccaatcaatctgtgggccctacataaatcagacagtgccttctcaagcttgcctgtagaatccagtgcactctgccaccagcaggtctttccttttcagatacctctctctggcaagagacagacagagacggctgctctcctctcccctttcttctgcttattaaactttccgctccttaacccattccatgtgtgcgtgtccatgttgttaatcttctcagcacaaaatgaccaaccccaggtatttaccccagacaatgatgccacttcacttgtaggttcctccaatccacttttctcttcatgaaattagtgagaacaaaaccacccttttct

SEQ ID NO: 1248 - DNA, 413 bp, Homo sapiens
  misc_feature 257: n = A,T,C or G
ccctttcgagcggccgcccgggcaggtacatctcctggccctcaggtgtcatggaatttaggtagtagcagcctgaggctggggtcctgggcacctgactgaacatctcggcagatttcctattgccacctcagtctgcctgtggctgttgccgtctgtctccagtctcagtcaaagagcaaggcacccagcccaggacagctcaacagacccagcgatttttaaaaagaaagaggagtgccaaagccacaactcanaattccaacccccgggccctcacgtgacctcgggaaccaatgagaggaagagaggaaaatgggaacgtttgcagtcagccctaagccccgaccagaggcagttccagccgccagggtccctcacacaacgctgaaagcaaaatacacgtatttgac

SEQ ID NO: 1249 - DNA, 399 bp, Homo sapiens
ccctttcgagcggccgcccgggcaggtactctagcctgggtgacagaacgagactctgtctccaaaaacaaacaaacaaaacacagaaatactgggaataaaagtatttttgaaacatgtagatcctcttttattaagaaagaggcagacatctcacacttaggaaaatctcaacccttaaagagagaaatgaaatagaaattttacaaatcaaaacaaaagtaaaaaaaatcaaaaataacagatttttatcaaagaaattaaaatttcagatttaacgtggaaaatatctgaaaaatgttgtgattatgaataagccttatgacatttctgcatcacttcctgacttatagacctatttctctaaattgatattcattctacaccaatgaaccacta

SEQ ID NO: 1250 - DNA, 392 bp, Homo sapiens
cccttagcgtggtcgcggccgaggtacctgggtgatggccatactgcgtgccgccatagctcaagccatgtgcctgaggctgtgcatgagggagagaaagaatgtccactcccaaaagaactgattcaggcatgaacagaaccattgcacatcctcaggaggttctagcaaacctgcacatccatgtctgcacttagacaacataaacagagtgagaatgccttcccagagcacagcagaagttcaactggcaacgaccaggagaattttcagctcatcctttacagaaaatgtaacttccatggagaggacaggagaatcagacaaagacaagcggagactctttcttttctgcacgtgctggtacctgcccgggcggccgctcgaaaggg

SEQ ID NO: 1251 - DNA, 385 bp, Homo sapiens
acacatgtccaaggtcaggtcctgggtggtaaaggtaaatacaaattggaagggcactgtgtgagccaaaatgagtcagattagtcatgattcatttccagtttgggttttgggtggtcttggagaatgttgtaagcactgcttcattgataggttgattgagccagactttactcagcagcctggaaaaggagagatgggctctgggttctacctttgctcactggtaagttgctaagatttcagctttgccctcaaaccctgaagtagtccttcattcacacagtgggatcactcgaaaatgtcagatggggaagtccataggttgttactttaaagaaaatagaaaaaatgctggaaaaggtttcttcaattttaataccca

SEQ ID NO: 1252 - DNA, 338 bp, Homo sapiens
  misc_feature 38, 57, 66, 73, 74, 78, 80, 81, 82, 83, 84, 85, 86, 106,107, 119, 120, 136, 140, 146, 147, 150, 151, 152, 153, 157,159, 169, 170, 171, 172, 180, 181, 183, 184, 192, 198, 210,211, 212, 213, 218, 219, 226, 227, 234, 235, 236, 237: n = A,T,C or G
  misc_feature 238, 248, 262, 278, 280, 281, 283, 295, 296, 297, 298, 299,300, 301, 311, 312, 313, 315, 316, 322: n = A,T,C or G
actttttttttttttttttttttttttttttttttttnttttttttttttttttttnaaaaaaaanttttttnngggnannnnnnntttttttttttttttttttnnaaaagggggggnnaaaaaaaaaaaaaaanaaangggggnnaannnnaaangntttttttttnnnnaaaaaaanngnntttttttnaaaaantttttttaaaannnnaaaanntaaaaannttttttnnnnngaaaaaaaantttttttttttttnggggggggaaaaaaanannantttttttttttnnnnnnnaaaaaaaaannntnnaaaaanggggtttttttttaaa

SEQ ID NO: 1253 - DNA, 428 bp, Homo sapiens
ccctttcgagcggccgcccgggcaggtacgcgggggccgagagtctgtgcgaaggtccgtggacagactgctttgcctgttgttgctcttcggaggcggcgatccccgaaggcgagctgaaatacggctgcaggctacaatttgcagccgaccattatggatgacaaggagccgaagaggtggcccaccctcagggaccgcttgtgctcggatggcttcttatttccccaataccccattaaaccgtatcatctgaaggggatccacagagctgtcttctatcgtgatctggaggaactgaagttcgttctgctcacgcgttatgacatcaataagagagacaggaaggaaaggaccgccctacatttggcctgtgccactggccaaccggaaatggtacctcggccgcgaccacgctaagggcgaat

SEQ ID NO: 1254 - DNA, 392 bp, Homo sapiens
  misc_feature 53, 54, 108, 130, 135, 138, 141, 142, 143, 149, 153, 157,159, 165, 176, 179, 184, 190, 191, 193, 196, 197, 202, 204,206, 226, 227, 239, 241, 242, 243, 249, 256, 261, 263, 269,270, 272, 274, 298, 301, 305, 306, 307, 324, 334, 335: n = A,T,C or G
  misc_feature 336, 337, 339, 340, 341, 343, 344, 347, 350, 353, 355, 374,375, 376, 377: n = A,T,C or G
ccctttcgagcggccgcccgggcaggtactttatttttttttttttttttttnnattttttttttttttttttttttttttttttttttttttttttttttttttttntattttttttttttttttttanggggnttnaannnaaaaanttantttngngttttnaaaaaaggggnaanttttnaaaaanngnggnnaaagntntnaaaaaaaaaataaaattttnngggggggggggngnnngtttanaaaaaanttttntnaaaaanntntnaaaaaaattttttttttttttttnccnaaannntaaaaataatatttttnaaaaaaaaannnngnnnannctnttnttnanaaaaaaaaaaaaaaaaaannnngaaaaaaaatatttt

SEQ ID NO: 1255 - DNA, 265 bp, Homo sapiens
  misc_feature 26, 41, 104, 106, 111, 133, 199: n = A,T,C or G
ggtaccattggtggccaattgatttnatggggagggaaggnaacgcctggctcggagcagtagcctctgaggtgtccctggccagtgtccttccacctgtccanangcatnggggaacattttcaccaacctnttcaagggcctttttggcaaaaaagaaatgcgcatcctcatggtgggcctggatgctgcagggaanaccacgatcctctacaagcttaagctgggtgagatcgtgaccaccattcccaccataggcttcaac

SEQ ID NO: 1256 - DNA, 404 bp, Homo sapiens
ccctttcgagcggccgcccgggcaggtacagctggtccaggatagcctgcgagtcctcctactgctactccagacttgacatcatatgaatcatactggggagaatagttctgaggaccagtagggcatgattcacagattccaggggggccaggagaaccaggggaccctggttgtcctggaataccagggtcaccatttctcccaggaataccaggagggccctaaaaaagagataaaaataaattaaatagtgaaaaatcctggtgattcacaatcattatcagattgttgtttctctactttataatattaggaaacaatataagtaatatattttctttataacacatactttttaatcaaaatcttgtgaataatttaagtataatgtattcctttgt

SEQ ID NO: 1257 - DNA, 198 bp, Homo sapiens
ccctttcgagcggccgcccgggcaggtacgcggggagtgccgccgggactcttggcgggtgaaggtgtgtgtcagcttttgcgtcactcgagccctgggcgctgcttgctaaagagccgagcacgcgggtctgtcatcatgtcgcgttacgggcggtacctcggccgcgaccacgctaagggcgaattccagcacact

SEQ ID NO: 1258 - DNA, 524 bp, Homo sapiens
  misc_feature 81, 82, 90, 93, 94, 97, 98, 99, 101, 110, 112, 113, 115,116, 118, 120, 122, 127, 164, 167, 169, 186, 188, 193, 195,197, 199, 200, 211, 213, 214, 217, 224, 225, 227, 237, 242,243, 250, 252, 254, 255, 257, 259, 261, 275, 276, 277: n = A,T,C or G
  misc_feature 283, 284, 285, 287, 289, 300, 309, 314, 315, 317, 319, 321,325, 328, 340, 345, 346, 347, 353, 362, 363, 367, 374, 375,376, 377, 378, 379, 386, 388, 405, 406, 407, 408, 412, 415,417, 418, 419, 420, 421, 427, 429, 434, 435, 436, 437: n = A,T,C or G
  misc_feature 438, 440, 441, 443, 444, 446, 448, 449, 450, 452, 455, 460,465, 466, 467, 470, 471, 472, 492, 493, 496, 505, 506, 508,509, 511, 521: n = A,T,C or G
acttttttttttttttttttttttttttttttttttttttttttttttttttttttttttttttttttttttttttttttnntttaaaanttnnttnnnanaaaaaattntnnanntntntnaaaanaagaaagctttttttaaaaaaaaaaaaaaaaatttanccngnctcacaaatgtaagtananaaatntnangnntaaaaaaaaantnnccnctccttnntntttaaggggnaaaannccttttncntnngngngnaaaaaaaaaaattnnntttttnnngnanactggccggcnatttctaanggaanntngntntatnctnaaaaaaaatagntattnnngggaanaaaaaaaannaaanaaaattnnnnnngggaacnanaaaaaaaaaaaaaaaannnncccnccncnnnnnaaaaananttatnnnnncnnannanannnanganaaaanatttnnnttnnnaaaaaaaaaaaaaaaaaaannttnggggggggnngnnanaaaaaaaaanaaa

SEQ ID NO: 1259 - DNA, 407 bp, Homo sapiens
  misc_feature 96, 99, 103, 109, 113, 114, 116, 120, 123, 124, 128, 129,131, 137, 140, 142, 147, 148, 152, 153, 154, 163, 166, 167,168, 169, 173, 175, 176, 177, 181, 185, 186, 188, 190, 192,193, 199, 201, 203, 204, 206, 213, 215, 217, 218, 221: n = A,T,C or G
  misc_feature 229, 232, 233, 234, 237, 241, 250, 251, 252, 258, 259, 260,266, 274, 277, 280, 282, 284, 287, 288, 290, 291, 299, 302,307, 310, 313, 314, 316, 319, 320, 330, 332, 333, 335, 343,347, 348, 358, 359, 366, 367, 372, 398: n = A,T,C or G
ccctttcgagcggccgcccgggcaggtacccctcaccctccctcctccaatctccccatggcaaaaaaatgcacctttttttttttttttttttgnaangggntttttntttnntncccnaanngggnngncggggnccnantttannttannngaagccccnccnnnngggntnnncccntttnncngncnnaacccncngnngnggggggnanannggncccccccnccnnnccngggnaattttttnnntttttnnnaaaaanggggtttnaanggncntnccnngnngggttttnttnccccnccntannanttnncccccttggncnncnaaaggggngggnntaaagggctnnacccccnnccccnaccaatggcccttttttttttttttnaaaaaaaaa

SEQ ID NO: 1260 - DNA, 317 bp, Homo sapiens
  misc_feature 83, 84, 85, 86, 87, 88, 89, 90, 91, 92, 96, 97, 98, 103,104, 124, 125, 126, 127, 133, 134, 135, 138, 142, 143, 151,152, 153, 154, 156, 161, 163, 167, 168, 169, 170, 173, 176,177, 178, 180, 181, 182, 183, 184, 185, 200, 208, 213: n = A,T,C or G
  misc_feature 214, 215, 217, 220, 223, 225, 231, 233, 245, 248, 249, 250,257, 260, 263, 266, 270, 273, 276, 277, 278, 293, 298, 303,304: n = A,T,C or G
ggtactttttttttttttttttttttttttttttttttttttttttttttttttttttttttttttttttttttttttttttnnnnnnnnnnaaannnttttnnaaaaaaaaaaaaaaaaaaannnntttttnnnatngcanngggggggnnnnanaaaantntttnnnnttnaannncnnnnnnaaaaaaaaaaaaaanaggggggnggaannntnttnctnanaaaaanancttttttttttngcnnnaaaaaanaanacnccncccnccnctnnnggggggggggggggngaaanacccnnggggggaaaattt

SEQ ID NO: 1261 - DNA, 324 bp, Homo sapiens
  misc_feature 14, 97, 101, 110, 112, 113, 125, 129, 133, 134, 135, 136,137, 138, 140, 156, 157, 158, 159, 166, 167, 176, 177, 178,179, 180, 181, 182, 191, 192, 204, 213, 216, 224, 228, 232,233, 238, 239, 240, 247, 251, 253, 254, 256, 258, 259: n = A,T,C or G
  misc_feature 260, 263, 264, 266, 267, 281, 282, 283, 284, 286, 287, 300,303, 309, 317: n = A,T,C or G
ccctttcgagcggncgcccgggcaggtactttttttttttttttttttttttttttttttttttttttttttttttttttttttttttttttttttntaanaaaaaaaananntttttttttttncgcngagnnnnnntnaaaaaaaaaaaaaaannnnttttttnnggggggggnnnnnnnaaaaaaaanntttttttttttnggggggggnacnaaaaaaangggnggannaaaannnttttttntctngnnanannnaanncnntaaaaaaaaaaatnnnncnncacttttttgggngantgtaangggggggnggggggg

SEQ ID NO: 1262 - DNA, 236 bp, Homo sapiens
  misc_feature 112, 117, 118, 119, 120, 128, 133, 134, 135, 146, 148, 149,157, 158, 163, 180, 181, 182, 183, 189, 190, 197, 198, 199,200, 202, 203, 212, 215, 216, 217: n = A,T,C or G
cccttagcgtggtcgcggccgaggtactttttttttttttttttttttttttttggggttttttttttttttttttttttttttttttttttttttttttttttaaaaaaanccccnnnntttttttntgggnnnaaaaaaaaaananncccccccnnggggngggggggggggtttttnnnncccctnntgtttcnnnnannccccccccnccnnnttttttttttttttttttt

SEQ ID NO: 1263 - DNA, 284 bp, Homo sapiens
  misc_feature 1, 71, 124, 162, 185, 211, 244: n = A,T,C or G
nggggcccttagcgtggtcgcggccgaggtactttttttttttttttttttttttctcaagcgacgctcanacaggcgtagccccgggaggaacccggggccgcaagtgccgttcgaagtgtcnatgatcaatgtgtcctgcaattcacattaattctcggngctagctgcgttcttcatcgacncacgagccgagtgatccaccgctaanagtcgcccgcgtacctgcccgggcggccgctcnaaagggcgaattccagcacactggccggccgttactagtg

SEQ ID NO: 1264 - DNA, 727 bp, Homo sapiens
  misc_feature 253, 444, 556, 570, 576, 622, 677, 678, 693, 701, 708, 721: n = A,T,C or G
cccttagcgtggtcgcggccgaggtacttcactgcggacttgacttcttgagcaagaaggctggcactgttcattaagagaatcacagagatgaatctcacaatgcaggaaaactaggtcataatgtccagcaaacatgaacatctgaactgagaaccggctttccgaggactgcccattctcctccacgtggatggtggaatcacgctgatttgagcagctgtttctgatgatgaaaatacttcacaaggtnagccttgtcttcagtggggggtggcattagcagttcctcaacacccagggttaaaacccggggaggtgtccccttgttccaagatggcacccacattaccagcaccgggacctcaacagacagtttccaactgcatcccctttcgtaaagggattccggtggttagttttctgggtctttggggaaagaangggcccattccctggaccaaattgaaaacttctttccattttcccccggtcccaccaccttggaccgttttccaagggggaaacctttaccaaattgggggccttggcaaangggccaagcctttngggaanggcttggaccttttccattgttccccaggtggggggtaaggggccncattttgggaaaaggtttggaatggtttggaagggaatggggtggtccttcttgnntgaatggaaaaattncatttggnccccaangggagaagggggnggtttt

SEQ ID NO: 1265 - DNA, 159 bp, Homo sapiens
  misc_feature 46: n = A,T,C or G
cccttagcgtggtcgcggccgaggtacgcgggaacgtggtccctanaacaagaggcttaaaaccgggctttcacccaacctgctccctctgatcctccatcagggccagatcttccacgtctccatctcagtacctgcccgggcggccgctcgaaaggg

SEQ ID NO: 1266 - DNA, 321 bp, Homo sapiens
ccctttcgagcggccgcccgggcaggtacatctgccagtgctcagaaggtccaagtctcaatccagaccccagcaggtcaagttctccgatgatgtcattgacaatgggaactatgacattgaaatccggcagcctccgatgagtgaaaggactcggagacgcgcctacaattttgaagagaggggatccaggtctcatcaccaccgccgccggagaagtagaaagtcccgctccgacaatgccctgaatcttgttacagaaagaaaatactctcccaaggacagactgcggctgtacctcggccgcgaccacgctaaggg

SEQ ID NO: 1267 - DNA, 536 bp, Homo sapiens
  misc_feature 339, 398, 409, 438, 448, 458: n = A,T,C or G
attcgcccttagcgtggtcgcggccgaggtacgcggggggagagcagagcgcggcggctggaagctgctaagtcagagccgcgatgttccggattgagggcctcgcgccgaagctggacccggaggagatgaaacggaagatgcgcgaggatgtgatctcctccatacggaactttctcatctacgtggccctcctgcgagtcactccatttatcttaaaggaaattgggacagccatatgaaggacagggacatcacattatgaaatgcaccgattattgaaggagccctgggttacaggtttccgactcctctctgccaaggtgaataaggcccagnaaagggtggtaaaggagactctttgaatgggaccattaaaaatttcttgcttgttaaanaaacaagtttnggctctggtaacctggacctttcaaaagnctaaaaatantaaaaacttntttttggggaaggtattgaaaacgattgtcctcgtggatctggtgtaccctgccccggggcggccgcttcgaaaaggg

SEQ ID NO: 1268 - DNA, 364 bp, Homo sapiens
  misc_feature 179: n = A,T,C or G
ggtacacatgccagctctggcaactaccctatgctggctctaccaccaaagacccggaaccaaagttgggtgcacagtttgctccctgaatggtgggctcaggcacggctctgacttcatttctcaggcaggcaacagacacgtttaccttacgctctggctcctgctgttccttgcancaagggggaattcgatgggacctaaaaatcatctggaacatacacagacatggatatcttctctctcacataaacacaaagacctttccccatatttccgtgcaggccaagcctctgtattttccagcatgacactgtatttgcgtattgtagtggatgggacattggggatctcctagtcctgt

SEQ ID NO: 1269 - DNA, 395 bp, Homo sapiens
cccttcgagcggccgcccgggcaggtacgcgggtaatttggttggccaattagaaatgcctttttcagttggtgtattgaaagctttcctttaacattttcacctgctcattgtgattcctccttttagtctaatatctttccaggtcatacttgtttttaatcattaaatattttcttcctggttttggagactaagctgataaactttttttaaaacttaagcattgtcattgctattttttttaatttgactttcctaggagtttaagatcagccatgaccaacatggtgaaaccccatctctattaaatacacaaaataaaaatgagccaccgtgcctggccagaataggttttttctttcaacttgatcagtagaaaatggacatcaagt

SEQ ID NO: 1270 - DNA, 408 bp, Homo sapiens
  misc_feature 170, 310, 327, 328, 345, 362, 363, 372, 387, 390: n = A,T,C or G
cccttagcgtggtcgcggccgaggtacgatgttgtgtggggagaggtgatatggtcactgtagggagacggcacatgctcactatcataatggcttccatggggtgaggagtgtgagtgatcactgctgtattgctgtcgtgaggtgattaggtcatctgccttgctcancagctgggcaggatgtggcctctgggaggcatggctgccgtcatgaagtccatgaaactgtcctgggaaggctctctccccaagtgcactctggctgatcagagtggcagaaataaaggccaacgttggctggggcaganaactgcccctggatctnncctgccaggggtgttangtgggtttgacaaggtnncagaacggncaggttcttatccanctntagactagaaaaattatc

SEQ ID NO: 1271 - DNA, 318 bp, Homo sapiens
ccctttcgagcggccgcccgggcaggtacgggggtttggttgactgccagccctggagggttgtcttctgcccacacctttgaccatcacttagccagagctggtcttatctcttgacctggctcggttaagaaaagtcttcattcctcctcctgggggacagtaagggccatgatgactccctttccgggtaactttagctgtaaaagagctgtgctctgtaagagagatggtggctctcagcttgctaagcaagtcccttcccagcaagggcaaggagaagtcgggcatgtacctcggccgcgaccacgctaaggg

SEQ ID NO: 1272 - DNA, 365 bp, Homo sapiens
ggtacttcccataatccccacatgttgtgggacgcacccggtggcaggtaatggaatcatgggtggttacctccatgctgttctcatcatagtgagttctcatgggatctgatggttttctaaggggcttttcccctttttctcagcacttccttttgctgccatcatgtgaagaaggatatgtttgcttccccttccaccatgattgtaaatttgctgaggcctccccagccatgcggaactgtgagtcagttaaacctcttttctttataaatcacccagtctcaggtatgtccttataggagcctgagaacagactaatacacctgtcaatgccaaaatgatatattttggtggatttaaaa

SEQ ID NO: 1273 - DNA, 981 bp, Homo sapiens
  misc_feature 19, 37, 39, 43, 45, 72, 78, 262, 512, 532, 541, 767, 800,840, 862, 868, 956: n = A,T,C or G
actattagggggaagttcngtacacacagggccgtantngggngnccccttcttaagaatggccattggccntcggangccgggcccggcccaagttggtggaatggggaatattcttgccaagaaattccgccccctttaagccgggccccgccccggggccaagggtacccggcgggccccgtttaaaaacattgttgttcaacttgggggccaaggccgggtggcccctcttaaataacttgggtggaatgccttaagnaagggttgaatggtttttttgggttaaaacaagggccgggggggtaaaagaatttggcccggaagtttcccttttttaactttttttttttaaacccttttcccttttaattggaagccatttggcccttggttggtttgggggttttggaccaagttggaaggggggttaaattaaattggaccttttggttttggggtttggaatttggttaaggaattaattttggggggccttggtttaaaatttnggtccaaggttttccaagtnggttttttnaaattccttgaaccgccaagggccttttaattggccggggaaggggaagaaaaattggttttttttccaattggttttaaccttttaattaacttaaaaccattttaaggttttccttttccttaattaaggggggttggaattaaggaattttggggttccccaaaattttggggggttggttggaaggggaaagttttccaaagttttaattaattggtttttnggggggaattttttttttttaaggggttaaagnttggggggttggttttggaaagcccttttggaaaacccgnccttttttccttttaaaatttnggggtnggggccttggccttttttttaaggggccccttacctttaattggggggttggttttaaaaaatttttttttttaaccttcttccttcnttaaccaaaaggggttttttttttt

SEQ ID NO: 1274 - DNA, 400 bp, Homo sapiens
ccctttcgagcggccgcccgggcaggtacgcgggacacattcagaggtgagcccagagcgggtaaagtggactggggagaacttcggaggatgttcatgtccaggagcagccccacgccctgtatggtcggtgtctagagcctcacagcaactaagaccaacccagctctcagaagaaggaatgtcaaaatgtcatgttcaattttacattcagtgcctggaatcttttcttcacaattgaaatgaaatgtgctgaaggaggtgaatccatgcattaatcttcagctcacaaaggaaatactacataagaagcaagaccacagactcaagacggacataattggattttttttgccatggcctggaaagaaaggtacctcggccgcgaccacgctaaggg

SEQ ID NO: 1275 - DNA, 541 bp, Homo sapiens
ccctttcgagcggccgcccgggcaggtacctattaacatcactcagctgctgtgaaataggcttacaggcaacatggagtgtcaattacccaatgtttaaagtcgatcatacagattggactacaatctctatggctcataaagtctttaaaggattgacagatgatttatctcatatgtagacaatgattctcagcagttaactagcgcaacttgataatatcaattgcttgagaaaatcagataattgcttgagaaaattaggacattgcttgaggaagttaggtagttaaataaattactttttttaaagaatagtttaatattttggcaagtagactttaaaataggttggtaatattttaaaggctacttttaaagaagtagcaatataacatgtttaattatgaaaaataatgttggaaacaattcaattttctatcagatcattcacaaatacagaaataccatctcaataattagaagaagtagcagcaatttctgtcatttttatgccagttactcttagtccatttatttg

SEQ ID NO: 1276 - DNA, 422 bp, Homo sapiens
ccctttcgagcggccgcccgggcaggtacggggaaaagtgatgacagcgtgactatgtagagttatataaactatgtaaaaagtcataaaaatgtgagtggagtgaatttgtcacctcgattttcttttcccttaaccactctactttccttctctctccatctgtaatgctatgcagtaacttcagttttatgcttccatccatggcagatatcatcaagcaatctaacacttattcttgttgaggttccagtaagccttgagtccaagctgccactactacagggggttatccacatggaaagtgcagattgttactactcacctcattccgtaagcagaagcaaattctgtatagatgaaggacttaactatgacagccaatactttaaaatatttagaaaataaatatttttattatc

SEQ ID NO: 1277 - DNA, 430 bp, Homo sapiens
  misc_feature 387: n = A,T,C or G
cccttagcgtggtcgcggccgaggtacgcggggaattgctaatgggaatggggtttattttgaggtgatagaaatattgatgaaattagaaattggcggtgattgctaatgggaatggggtttattttgaggtgatagaaatattgatgaaattagaaattggcggtgattgctaatgggaatggggtttattttgaggtgatagaaatattgatgaaattagaaattggcggtgattgctaatgggaatggtgtttattttgaggtgatagaaatattgatgaaattagaaattggcggtgattgctaatgggaatggggtttattttgaggtgatagaaatattgatgaaattagaaattggcggtgattgctaatgggaatggngtttattttgaggtgatagaaatattgatgaaattagaaattg

SEQ ID NO: 1278 - DNA, 506 bp, Homo sapiens
ccctttcgacggccgcccgggcaggtacgcggggagagacaaaaacagaagaggggaaacatgtttcctactgacgacaggtgattacacgtgtgcttctgatggagggatcaggaaaggatatgaaaaatcccgaagcttaaacaacatagcgggcttggcaggcaatgctctgaggctctctccagtaacatcaccctacaactctccttgtcctctgaggcgctctcgatctcccatcccatctatcttgtaaaccaaacaaccaaactgcatcagtcggctaaattgtattaattcaagtgctgtttaccccataatggaaataattaaatgtagagttactccaggctccattaatacagtataaatcttgcatgatactacaatttgaagtcagaaatgccacttgggtagctaatgaatcttacccaggctttaaagattgtctaaagtagtgctaaaatccctcctattaattgccctgatatccttttgcaataaaa

SEQ ID NO: 1279 - DNA, 351 bp, Homo sapiens
cccttagcgtggtcgcggcccgaggtacatgcctgtaatcccagctactggggaggctgaggcaggagaattgcttgaacctgggaggcagaggttttagtgagctgagatcccgccattgcactccatccagcctaggtgacagagcgagcgagactccatctcaaaaaagagaaagaagaagaagagagctcaacaatgcagccagggaagatttcctgtaggagtcttgagacaggagaaagagagatggaagagaaagaaagcgcatgctgcctctgaaaaaatggagagatcacccccgcgtacctgcccgggcggccgctcgaaagggcgaattccagcacactg

SEQ ID NO: 1280 - DNA, 382 bp, Homo sapiens
ccctttcgagcggccgcccgggcaggtacttccgatcagcctcctacaaaccctctgctttcagtcttcaagccattctccacacagaagctgggaagagctctcaaaggcaatgccaaccatgttcctaccctgctgaaaacctcccaatgagttaggatgttaggctctcaaagcacttaacagcctaactccatcccatgacctcgggccctccttgctcttttcccacctttccctcattgcttcttacctcgggtccagccacaatggtttcctttctgtttcctgaacaactcagaccttttccagtcttaggacttttgctgttgttctttctgcctgaagccttctttctgccagctctcggcatgcttttctt

SEQ ID NO: 1281 - DNA, 424 bp, Homo sapiens
  misc_feature 395: n = A,T,C or G
cccttagcgtggtcgcggccgaggtactagcagaattcagctcctgcagtgataggactgaggtccctgtttccttgttggctatcaactggggtttgctctgggctcctggatactgctgcattccttgccaggtagtcctctccatctccaagccagcaacagcacataaacccctctcctgcttcgaatctcttacctcctcagcttctgacctctaaatacaggtttaaagggctctggcaaatgggtcaagcccactgacaataaattcccttctcgaagtcaactgtgccatatattaaacataatcacaggagtataagccaccctagtcacacagcccatggattatgcaatatatactggtagtgggtctactggaggtcatttanaattctacctaccacaatttacaaggaaa

SEQ ID NO: 1282 - DNA, 383 bp, Homo sapiens
  misc_feature 319, 335, 338: n = A,T,C or G
ccctttcgagcggccgcccgggcaggtacaaggttggtaggaggaagagaagaaatgattggctcccagaggcttcatgggctcccaattcatgattctttctctgtggctaatttttgttaagtataagaattccaggaatctcttaggaattgtggagactgctttctcctgaaatataaaacatctgctcttggtctgtttggcgctccactgtctgaggggaaaacagggaaaaagaggtaatataaaacagacattgtttcagacaataaatccccctttactcattaatgagaaaataaatttagggccagangtgtcagacttttcangangcctctttgtcttttcttttcttttttttaataatttaaaaaaag

SEQ ID NO: 1283 - DNA, 406 bp, Homo sapiens
  misc_feature 337: n = A,T,C or G
ccctttcgagcggccgcccgggcaggtaccacctatgaagtattctgcctaaagatattaaacctgaagcttatcaaatctgtaaatctgactacgacttgactgaaaatttagtggcaaaggaatatagtaaatgacatcacaaggatatagcatccaaacccagaaagcggatattctttaggataaatgacccagtttcctcaacaatgaaatggcctggaatagaaaaaagagggagaacttaaaataacataccaaccaaatatagcacatggatcctgttttaatatggattcagaaatccaattctgaaatgacattttttaaaaatcangaggccgggcgtgatggctcatgcctgtaatcccagcactttgggaggctgaggtgggcggatcacaag

SEQ ID NO: 1284 - DNA, 305 bp, Homo sapiens
accaaaacttgtccgaaaattatagctaaagttttctcacttttcctgtctttctcactactgggaaggcattaggaatggaattatctgagcatgcagaattgtgttttatttgcaataggtgagtattaacaaaaatgcataggtgtgcatctataaaatttatcatatacactcagtatagacaaatacttatgaaacattagaaaatcagctgaataccttgttaatacacagtatcattcagcataattgagtttctaaattttaataagttctcaggcgatgctgataccagtggtacc

SEQ ID NO: 1285 - DNA, 401 bp, Homo sapiens
ccctttcgagcggccgcccgggcaggtacgcggggacacattcagaggtgagcccagagggggtaaagtggactggggagaacttcggaggatgttcatgtccaggagcagccccacgccctgtatggtcggtgtctagagcctcacagcaactaagaccaacccagctctcagaagaaggaatgtcaaaatgtcatgttcaattttacattcagtgcctggaatcttttcttcacaattgaaatgaaatgtgctgaaggaggtgaatccatgcattaatcttcagctcacaaaggaaatactacataagaagcaagaccacagactcaagacggacataattggattttttttgccatggcctggaaagaaaggtacctcggccgcgaccacgctaaggg

SEQ ID NO: 1286 - DNA, 317 bp, Homo sapiens
  misc_feature 276, 283, 287: n = A,T,C or G
cccttagcgtggtcgcggccgaggtacagaacccaggagatccccagtccctgcgatgtaggatcccggacccccggcgctaagtggagatgcgccagctgccccacactggagaaggctcaaagaaaacaaatcccacccttcgccgcaggtggattctcctcccctagagctactgtccagttgctactggcctccagcaaaacaaacatcagtatggacggaaggagcaggacgcagggtggggagggtcacctttctgggagaaaagaaagnccgcggnctancgtacctgcccgggcggccgctcgaaaggg

SEQ ID NO: 1287 - DNA, 388 bp, Homo sapiens
  misc_feature 54, 67, 68, 75, 76, 84, 89, 90, 109, 114, 116, 117, 118,119, 125, 129, 130, 132, 137, 138, 139, 140, 144, 147, 150,154, 163, 165, 166, 172, 173, 174, 175, 185, 191, 196, 200,201, 216, 217, 218, 219, 220, 234, 235, 236, 239, 240: n = A,T,C or G
  misc_feature 248, 249, 256, 258, 262, 266, 273, 277, 280, 291, 292, 294,306, 308, 309, 311, 313, 322, 326, 329, 330, 331, 334, 343,355, 356, 357, 359, 361, 363, 365, 367, 368, 370, 371, 373,374, 375, 379: n = A,T,C or G
cccttagcgtggtcgcggccgaggtacttttttttttttttttttttttttttnaattttttttttnnttttttnnaaaaaaanttttnntttaaaaaaaaaaaaaaanttttncnnnnaaaaanaaanntnaaaannnntttnccnggntttnaaaaaaaantnntttttnnnnaaaaaaaaantttttngtttncccnnaaaaaaaaaaaaaannnnnttttttttaaaacnnnttnntttttttnncccccancnaaantttnaaaaaangggnttnccaaaaaaaanngntttttaaaaatngnnananttttttttncccnaannnccnttttttaantttttttaaaannnangntncntnntnncnnntttnaaaaaaaaa

SEQ ID NO: 1288 - DNA, 635 bp, Homo sapiens
  misc_feature 428, 458, 482, 506, 516, 518, 612: n = A,T,C or G
ccctttcgagcggccgcccgggcaggtaccatagatcactggtaggggaaacaaaagcaaaagcaaaacaaaacaaaaacaatagatcctgatgacacaggtctatttatacaaacgattgaagcaaaaatcaattgtaactgtatcagtttatgcagggagaaatgacaattctattgtcatgtggactaggacaatattggtgacaggatggggtttggaaagcttcaaaataattgggtgttatgtttaaacagctcataggtgcccccatttaccacatacccgtattggggcccgccaatttatttttctttccaggttttctggttgccaaaaaatgcctggaatttccaacccaaccccccttcaccaattatttggtaccctcgggcccgcgacccaccgcctaaggggccgaaatttcncagccacaccttgggcggcccgttacttangtggatccgagctcggtacccaanctttgggcgttaattccatggtcnattaagcctngntttcccttgtggtggaaaaattggttattcccgctcaccaaattttccccaccaccaaacattaccgaagcccgggaaaagccattaaaaaggntgttaaaaaggccctggggggtg

SEQ ID NO: 1289 - DNA, 398 bp, Homo sapiens
  misc_feature 378, 384: n = A,T,C or G
ccctttcgagcggccgcccgggcaggtacctttctttccaggccatggcaaaaaaatccaattatgcccgtcttgagtctgtggtcttgcttcttatgtagtatttcctttgtgagctgaagattaatgcatggattcacctccttcagcacatttcatttcaattgtgaagaaaagattccaggcactgaatgtaaaattgaacatgacattttgacattccttcttctgagagctgggttggtcttagttgctgtgaggctctagacaccgaccatacagggcgtggggctgctcctggacatgaacatcctccgaagttctccccagtccactttaccccctctgggctcacctctgaatgtccccgcgtacctnggccgngaccacgctaaggg

SEQ ID NO: 1290 - DNA, 403 bp, Homo sapiens
  misc_feature 84: n = A,T,C or G
ccctttcgagcggccgcccgggcaggtacgcgggacattcagaggtgagcccagagggggtaaagtggactggggaggacttcngaggatgttcatgtccaggagcagccccacgccctgtatggtcggtgtctagagcctcacagcaactaagaccaacccagctctcagaagaaggaatgtcaaaatgtcatgttcaattttacattcagtgcctggaatcttttcttcacaattgaaatgaaatgtgctgaaggaggtgaatccatgcattaatcttcagctcacaaaggaaatactacataagaagcaagaccacagactcaagacggacataattggattttttttgccatggcctggaaagaaaggtacctcggccgcgaccacgctaagggcgaat

SEQ ID NO: 1291 - DNA, 360 bp, Homo sapiens
ccctttcgagcggccgcccgggcaggtactttaagaagtaatgcccttgagttagaaaatcatcattttaaaatctctgatgatataatggatttaggcaataatcatcaaaaaactaagttaagactacaacctgtcaaccaaataccatgtgtagaccttgtttggatattgacttaagcaaataaccctacaaagacacttttacaatcaagaaaaactgaatgggactgcgcatggtggctcatgcctataatcccagcactttgggaggcaggtgaattgcttgagcccagaagtttgagactagcctgggcaacatggtgagaccctgtctctaatataatttaaaaaaaagaa

SEQ ID NO: 1292 - DNA, 390 bp, Homo sapiens
cccttagcgtggtcgcggccgaggtacatgttaaggtttggtgaatgcatgcattcacggaactaccactccagttgtgttagtttcccatggcagctttaacaaattactgcaaatttcatggcttaaacgaacacacatttatgcttacacagttctggcagctaaatgaccaatgggtttcattgggacaaaatcaaggtgatggcagagccctgcttcttttgggggctctagagtccatctgcttccttcccttctccagcatctggaggtcacctcatttattggcttgggtccctgaactgcatcaccttttctttcttgtgtccattgttttctcatcttcctcctcatctgtctgcaaatctccctctgcctccctttcat

SEQ ID NO: 1293 - DNA, 272 bp, Homo sapiens
ccctttcgagcggccgcccgggcaggtacttttttatagaagcccaactggactgacagatgtcaaggggttgggggatcctcagtaggctaacctagcagagttcttgctaaaactgggctagacaggccacagacaagatagccaaaatcaaagcctagttgagaagggaattcagaggagcatgactaaaatttggtcaaggggagagtctttgtcaccccagcacctagcacaagtggttggtacctcggccgcgaccacgctaaggg

SEQ ID NO: 1294 - DNA, 386 bp, Homo sapiens
  misc_feature 162: n = A,T,C or G
cccttagcgtggtcgcggccgaggtaccttcactctccaccaagcacctgttatcggaaaacgtccaaacactttacatgtctcttgtgtgttttcatcacaaatagaaactaaaaaaaaacaaacaaaaacccacaaaagttaactctggagattattcanaaaccgtttcctcaaagttttatcaaacttaccactatctttaatctccctacagcactctctaaagatgtctggtagggtgcctgtaacactgcattctgcctacctctttttctgtctccctccactacactgtaaatactaaaacaggacactgtttcgtttgtctttgtattccaaaacgcaagcacagtacctgcccgggcggccgctcgaaagggcga

SEQ ID NO: 1295 - DNA, 375 bp, Homo sapiens
cccttagcgtggtcgcggccgaggtacagattatttcatagcccaggtattaagcctcgtgcccattaggtgtttttactgatcctctccctccttccatgctccaccctccaaaaggccccagtgcgtgttgttgccctctatgtgtccgtgtgttttcatcatttaactcccacttataagtgaaaacatgttaagtatttcatgttagtttgctcaggataatggcttccaactccatccatgtccctgcaaaggacataatgtccgttcttttttattggcctaattcttaggcagtcttttctggaattgtgacagaaaaggttcaaagcagttattttttttcatattatatccatagttgtgttttta

SEQ ID NO: 1296 - DNA, 367 bp, Homo sapiens
cccttagcgtggtcgcggccgaggtacgcgggtggactggggagaacttcggaggatgttcatgtccaggagcagccccacgccctgtatggtcggtgtctagagcctcacagcaactaagaccaacccagctctcagaagaaggaatgtcaaaatgtcatgttcaattttacattcagtgcctggaatcttttcttcacaattgaaatgaaatgtgctgaaggaggtgaatccatgcattaatcttcagctcacaaaggaaatactacataagaagcaagaccacagactcaagacggacataattggattttttttgccatggcctggaaagaaaggtacctgcccgggcggccgctcgaaaggg

SEQ ID NO: 1297 - DNA, 402 bp, Homo sapiens
  misc_feature 337: n = A,T,C or G
ccctttcgagcggccgcccgggcaggtaccacctatgaagtattctgcctaaagatattaaacctgaagcttatcaaatctgtaaatctgactacgacttgactgaaaatttagtggcaaaggaatatagtaaatgacatcacaaggatatagcatccaaacccagaaagcggatattctttaggataaatgacccagtttcctcaacaatgaaatggcctggaatagaaaaaagagggagaacttaaaataacataccaaccaaatatagcacatggatcctgttttaatatggattcagaaatccaattctgaaatgacattttttaaaaatcangaggccgggcgtgatggctcatgcctgtaatcccagcactttgggaggctgaggtgggcggatca

SEQ ID NO: 1298 - DNA, 326 bp, Homo sapiens
  misc_feature 39, 64, 70, 104, 114, 122, 124, 129, 134, 136, 141, 146,180, 182, 190, 201, 210, 214, 215, 228, 234, 236, 243, 245,246, 247, 274, 309, 313: n = A,T,C or G
ccctttcgagcgggcgcccgggcaggtacagtccactancatggaagctatgggtgtgggcatntaaaantgccccgtaagcaggtgtggccaggctggggccnttggaaaagncaaccaantnaagantgctnanatcanaccanccccatctcaagtgcaagattgcccagcctccananatcatgtntcagaggatanctctgtcanaacnnaacccaggcacanttcaantnctctgcngnnngtagttagacttcttttattaagcaantctcctttttttaaaaagggaactctcggtcctgntctntgctgggcaatct

SEQ ID NO: 1299 - DNA, 301 bp, Homo sapiens
cccttagcgtggtcgcggccgaggtacgcgggtgagatggcaaatatttattaatcatccaactgtgtatcagacactaagaataagctgggaggccatggcaagtgaggtcaccacagtccctgccacagtggaggttatggtatacaggtaaggcagggaagagcactgcaaagggtttgcccattgcatcagtcatttatttatgcacatgttgattcaacaattatttctatgccaagctgtcttcaaggtgctggaggaaatgaagcgtacctgcccgggcggccgctcgaaaggg

SEQ ID NO: 1300 - DNA, 310 bp, Homo sapiens
  misc_feature 253, 274, 290, 292: n = A,T,C or G
cccttagcgtggtcgcggccgaggtacctgccatccaatacggtcattagattgggtcatcttgattagattagattagattagattgtcaacagattgggccatccttactttatgataggcatcattttagtgtgttacaatagtaacagtatgcaaaagcagcattcaggagccgaaagatagtctgaagtcattcagaagtggtttgaggtttctgttttttggtggtttttgtttgttttttttttcnccttaagggaggatttaattngctcccaactgattgncncttaaatgaaaatttaaa

SEQ ID NO: 1301 - DNA, 314 bp, Homo sapiens
  misc_feature 1, 159, 162, 278: n = A,T,C or G
nggggcccttagcgtggtcgcggccgaggtactttatgtttactctgtcaggaaagcgtcagatgtttttatttccaattataagttttgtaatgcatcatgtattttgctgacagtcttcaagttcttgaaatagtgaacaaattaacagcagatatnggngtgagagaattagaaaaccaactggcaactcatatgatagaattcagatacagggatgggtggaatgggctcatttattttattttctcagtcatactttgtaattaacttaggcnaaaaaaaaaaaaaaaaaaaaagtacctgccccgggc

SEQ ID NO: 1302 - DNA, 417 bp, Homo sapiens
cccttagcggccgcccgggcaggtacagagctggaggcccaaacagccagccaaatcttgctgtattttatccaccatagtataatccagagactgtggaccccaaattgggatgcttttaaaatccaaagtagttctgtatacacatttgaagaaaaatgctgttgaagaaatgtatccataaaacacttcaggtcaaaaagcaaaagaatatcaagaaaaagtttaaataacatgattcctactggttttagatcataattatcatcctatattatttatattccgtatcactgttatctttctctgacaaataattctgaaatacaatacattttaaagttatgcaggattttaaagacctcgtcttcaacaaatacaagaagtttaataacaaactttaaataaatgctcatt

SEQ ID NO: 1303 - DNA, 323 bp, Homo sapiens
  misc_feature 160, 161: n = A,T,C or G
gggggcccttagcgtggtcgcggccgaggtacctgggactacaggcacacactaccatgcctggctaacttttgtagtttctgtagagacgggtttcaccatgttgcccagactggtctcaaactcctgtgctcaagcaattctcctgcctcgggcatgnncaagtgctgggattacaggcttgagccaccacactcagccattaggcatttctttttgttccagaggtctgtgaaaaactatggagacatgaagggcagtgagccgagaaatcgtggcgccttctaacctacaggataagggcgtataatcagacttagtta

SEQ ID NO: 1304 - DNA, 415 bp, Homo sapiens
  misc_feature 14, 20, 22, 24, 32, 55, 330, 356, 377: n = A,T,C or G
tctagatgcatgcnccagcngncngatggatntcgtgcataattcgaccttagcntggtcgcggccgaggtacgcggggtcaaagccactgtttttataatctactccttatataaaacattaagtgaggccaggtgcagtggcccatttctgtaaacccagcactttggaaggccagtgcaggtggatcacttgagtccaggagtttgaggcctgcctggccaacatggcgataccctgtctctactaaaaatacaaaaattagctgggtgtggtggtgcatgcctgtagtcccagctactcaggatgctgagacatcgcttgaacctnggacgtggagattgcaatgagctganatcgagacactgcactgcagnctgggtaacagagtgagacttcttcccaaaaaaaaaaa

SEQ ID NO: 1305 - DNA, 283 bp, Homo sapiens
  misc_feature 9, 21: n = A,T,C or G
ggggggccnttagcgtggtcncggccgaggtacccgggtataagaatgagacacagtagctgctttcattgattctgttcaaccgttgattggaattccaagcaaatgcagcaagacaagaaaaagaagtcacaaccggaagaggtggggaggaaggccgggacaacagctcagtaaagctgaggtgcaaggctgggcacggtggctcacacctggaatcccagcacttttggaggcccgaggtgggaggatcacctgaggtgaagaccagcctggacaacat

SEQ ID NO: 1306 - DNA, 247 bp, Homo sapiens
cccttagcgtggtcgcggccgaggtaccacagaggccagcacagcttctcgtgaaagagagcttctgtattctcagtgggatccaggcaaacaagtaaattctggccccactccctccaccactcctctgggctcacctccagtctgaagagatgcactggatcacagggagattaaattcaaagaagactgcaggcaaggaggggctctgcagcagctgtacctgcccgggcggccgctcaaaggg

SEQ ID NO: 1307 - DNA, 406 bp, Homo sapiens
cccttagcgtggtcgcggccgaggtaccagtcatattggattagggctcataatgtcattttaacttaattgtctgtcaaaaaattctgtcttcaaatacagtcacatttctagggtttaggattttaacatatgaatgcagggggacaattcagtccataatactgtggttatcactttttggtcttaagatgattgctacagctctacaacccacatctattataaaaacaaaaagaagagagaaataaattgagagaggagagttccttgatcactttgcaggacgtgcgacagggggtgttgctcatctgtttggccaccacacattctcaggccctttgcaggacagggagcatgctgacaggcaggtgcagcaacccaggcgagtgccttggggctccag

SEQ ID NO: 1308 - DNA, 327 bp, Homo sapiens
ccctttcgagcggccgcccgggcaggtaccacctatgaagtattctgcctaaagatattaaacctgaagcttatcaaatctgtaaatctgactacgacttgactgaaaatttagtggcaaaggaatatagtaaatgacatcacaaggatatagcatccaaacccagaaagcggatattctttaggataaatgacccagtttcctcaacaatgaaatggcctggaatagaaaaaagagggagaacttaaaataacataccaaccaaatatagcacatggatcctgttttaatatggattcagaaatccaattctgaaatgacattttt

SEQ ID NO: 1309 - DNA, 305 bp, Homo sapiens
  misc_feature 90, 114, 154: n = A,T,C or G
cccttagcgtggtcgcggccgaggtacatgcctgtaatcccagctactggggaggctgaggcaggagaattgcttgaacctgggaggcanaggttttagtgagctgagatcccnccattgcactccatccagcctaggtgacagagcgagcganactccatctcaaaaaagagaaagaagaagaagagagctcaacaatgcagccagggaagatttcctgtaggagtcttgagacaggagaaagagagatggaagagaaagaaagcgcatgctgcctctgaaaaaatggagagatcacccccgcg

SEQ ID NO: 1310 - DNA, 309 bp, Homo sapiens
  misc_feature 30, 166, 180, 187, 267: n = A,T,C or G
actttttttttttttttttttttttttttngagagatggggtctcaccgtgttgccccagctggtctcaaactcctaggctcaagcaattctcgcacctcagtctcccaaagtgctgggattacaggtgtgagccacgatggccagccataatgcgaagttttaanaagctttcaggganaaggganagagaatgctctggaagcagccaagagaatcaatagagacattcacccatttcctgtcagtgttacaaggaaggtagaanaggacagagccattgtttgagaagcctacagggcaagccaag

SEQ ID NO: 1311 - DNA, 412 bp, Homo sapiens
ccctttcgagcggccgcccgggcaggtacgcgggatgaacaagctcaggaaaaatctaagaaggccttaatttctcacctctagctgactttcaggctacataaacaggaattgaatgataaggtagaaatgtgaactccctgactgagtgttgaaggtatgccctacacatccacaaaacccttgagcaaagactaaactaaataagcagagacttaagtggccacacataaaaaagaatacagactgcagaatgtgttcccccaaaaaatcactaagcaaagagcaggagtaacaataaacagcaacaataaatcctgcagaaaaggagattctgatttttagagttgacacataatattatttaagacactcagttttcaacaaaaaattatgaggcatgcaaaaaaaa

SEQ ID NO: 1312 - DNA, 137 bp, Homo sapiens
ccctttcgagcggccgcccgggcaggtacatgagattaactgatgtgtctacgtggtgccagtctgactaacagtggatgtgtgtgtgagtgaccctgcaatgtcatgatgtacctcggccgcgaccacgctaaggg

SEQ ID NO: 1313 - DNA, 310 bp, Homo sapiens
  misc_feature 1, 268: n = A,T,C or G
ngcccttagcgtggtcgcggccgaggtacatgcctgtaatcccagctactggggaggctgaggcaggagaattgcttgaacctgggaggcagaggttttagtgagctgagatcccgccattgcactccatccagcctaggtgacagagcgagcgagactccatctcaaaaaagagaaagaagaagaagagagctcaacaatgcaccagggaagatttcctgtaggagtcttgagacaggagaaagagagatggaagagaaagaaagcncatgctgctctgaaaaaatggagagatcacccccgcgtcctg

SEQ ID NO: 1314 - DNA, 360 bp, Homo sapiens
  misc_feature 73, 232, 237, 250: n = A,T,C or G
ccctttcgagcggccgcccgggcaggtactttttttttttctttctttctttttttttttgtatttttagtanagactaggttttaccgcgttagccaggatggtctggatttcctgacctcgtgatccgtccgcctcggcatcccaaagtgttgggattacaggcgtgagccacggagcccggccataggcctgtttcttattctatattcctgttaatgtaaacctcctnagatnggaagacaatcanttttacagggtaagaattgttttaattatgtggcagcttttctccaaacatgaagagaaacattagaaatacgtttaataaaatctctattattttgttttctttcaagt

SEQ ID NO: 1315 - DNA, 149 bp, Homo sapiens
  misc_feature 142: n = A,T,C or G
ccctttcgagcggccgcccgggcaggtactgggaatgactgagtagtcacaaattcagagagctgctgggaggtagatgagttggggctgggaggtgtccatgggatttgggggcttgagggtcacggtcacctcaagacancaagatg

SEQ ID NO: 1316 - DNA, 287 bp, Homo sapiens
  misc_feature 47, 159, 174, 181, 183, 185, 186, 198, 204, 213, 214, 216,219, 232, 243, 283: n = A,T,C or G
ccctttcgagcggccgcccgggcaggtactttttttttttttttttnggtttttttttttttttttttttttttttttttttttttttttttttttttttttttttttttttttttttttttttttttttattttttattgttttttttccaaacccanaaagcggatattctntaggatnantnntttttttttttnaataanaaaatgccnncntanaaaaaagaggganaacttaaaatncaaccaaccaaatatagcacatggatcctgttttaatatnggat

SEQ ID NO: 1317 - DNA, 163 bp, Homo sapiens
  misc_feature 13, 19, 93: n = A,T,C or G
cccttagcgtggncgcggncgaggtacctgctgtcttatgcatgtttaacacaacagcaacaataatataagtagttagcatatattaaagcnttaacgaacaccaagcatcgttaaatatattacatgtattattgcttaattttcacaacattactaatgg

SEQ ID NO: 1318 - DNA, 351 bp, Homo sapiens
  misc_feature 33, 34, 272, 282: n = A,T,C or G
gtaggaggcaaagtgatctgcttgaaaatatgnntgaaagataatcagcaaataatttcaaatcttggaactgtcattatgaatttactgccattagattgtattgaggtccctgaagtcatgggataaccagaagggggaatttgaagattccatttaataaaaagaagttgatacaaagaagctaagatatataataaaattttcatagtttggaagagaacatgatgcttctggtattccaattactgattataccttttgttcatagnctttttaaanctgagctctttggccaatcccatttcagcccgctttggtctcattaggtacctgcccgggcggccgctc

SEQ ID NO: 1319 - DNA, 293 bp, Homo sapiens
  misc_feature 79, 99, 144, 155, 157, 169, 251: n = A,T,C or G
cctttcgagcggccgcccgggcaggtactttttttttttttttttttttttttcaaaactagtgactcctgtcactctnttccactctaaaagggcaanatgcaatggcaaaagggcacataattctgtttccttgagtgtctnttagtattaangnaggctcagtttntaaatattaaaatgacccacaataagagctgcaatgattaagtttgtgacttgttataccaatcaatgtatgacaaacttanaaaaactgtatataatttacaatgacaagagaggaaagagga

SEQ ID NO: 1320 - DNA, 103 bp, Homo sapiens
  misc_feature 86: n = A,T,C or G
cccttagcgtggtcgcggccgaggtacgcggggttcaaagtctatttttattccttgatattggacttttatttttttttatttgnggatggggacattgtga

SEQ ID NO: 1321 - DNA, 371 bp, Homo sapiens
  misc_feature 40, 91, 106, 146, 165, 173, 205, 207, 245, 246, 250, 258,263, 288, 348, 350, 357: n = A,T,C or G
cccttagcgtggtcgcggccgaggtacacaaacccctttncaaatgaggaccgtgaagaaagggcccaaagtatctgcacacacacagaanatgcccagacagcanctagtaacagttctgggtgccacttactatgatcctggancagctgggctgcgatgganacccggcnccgctcacccgtggaaatgccccccaagctgnanttgccaatcagtcggtctgccacatggctcagactcanntctnccatgacngtctncacctgcaggagacacaaattacanggaaggctgggagtctctgtggctgctatttcaattcatgggctggggaggacatgaaanangcagcanaccgcccaagaatc

SEQ ID NO: 1322 - DNA, 122 bp, Homo sapiens
cccttagcgtggtcgcggccgaggtactttttgcattttcaaatgactttgactattgccagagtcattatagacctgcctatgatgtaggagtttattgtatctagtggaaaacatacctg

SEQ ID NO: 1323 - DNA, 625 bp, Homo sapiens
  misc_feature 27, 30, 34, 41, 45, 58, 60, 70, 76, 77, 78, 79, 82, 87, 88,89, 102, 104, 105, 107, 110, 111, 112, 113, 120, 125, 133,138, 139, 140, 144, 148, 149, 152, 155, 156, 157, 160, 161,162, 164, 170, 174, 175, 179, 180, 181, 182, 185, 186: n = A,T,C or G
  misc_feature 188, 191, 192, 196, 197, 198, 199, 200, 202, 204, 213, 238,242, 251, 259, 260, 261, 262, 264, 265, 271, 272, 273, 278,282, 290, 291, 295, 303, 304, 305, 308, 311, 316, 317, 323,324, 325, 326, 327, 328, 337, 343, 344, 347, 353, 356: n = A,T,C or G
  misc_feature 357, 358, 359, 360, 362, 364, 368, 369, 376, 387, 396, 399,406, 409, 410, 418, 432, 434, 435, 441, 448, 452, 453, 458,462, 463, 467, 474, 486, 487, 490, 492, 493, 494, 496, 502,505, 526, 530, 535, 544, 545, 546, 548, 550, 553, 564: n = A,T,C or G
  misc_feature 567, 573, 576, 580, 584, 586, 589, 590, 592, 600, 602, 613,614: n = A,T,C or G
acttttttttttttttttttttttttnggnaaanttttttntttnggggaaaaaaaancnaaaaaaaaantttttnnnnaanttttnnnaaaaaaaaaaaancnncnaannnnggggggnttttnaaaaaaanttttnnnaaancccnnttnccnnnttnnncnaaaaanaaanntttnnnnttnnanggnnaaannnnntngnttttttaangggtttttggggggttcccccaaancccnaaaaaaaanaaaaattnnnngnngggggnnnaaaancccntaaaaaanncccnaatttttnnnttnggnaaaannccccannnnnntttttgggnaaaaanntancccttnggnnnnncntngggnnaaaaaanggcccaaatantttttttcnaanggggttnaannttcccaanttttttttgaaaanannggggtnccttttngggnnttggnaaanntttnaaaaaangggggggggggnnttntnnngntgggcnccnttttaaagggggaaaaaaaanagcnccccncccttttannntnanttnggggaaaaagnggncccaanggntttntttntnccnntnaaaaaatntntaaaagggccnnggggggttttt

SEQ ID NO: 1324 - DNA, 701 bp, Homo sapiens
  misc_feature 51, 53, 56, 59, 66, 69, 80, 144, 153, 164, 182, 217, 277,284, 312, 323, 333, 346, 363, 371, 379, 394, 422, 425, 435,448, 500, 502, 512, 514, 529, 532, 536, 562, 571, 576, 578,579, 582, 612, 616, 619, 620, 623, 624, 625, 626, 627: n = A,T,C or G
  misc_feature 645, 647, 650, 651, 655, 656, 660, 669, 675, 679, 681, 684,685: n = A,T,C or G
cccttagcgtggtcgcggccgaggtactgctgcatttttgtttgtgtattnantcnttncctttgnttncaagtgaaatnttttgaaaacagtcctattatggctcaaataagcagaaatggggattttcttaggctaattgangaacatggngagggtggcanggacgactgctgacacanggcacgctggcctggagaagcaacagctgctggcntgcgtggacaccctttgcagacgtgtcccctgcgggggatgataattcatcaccctccancccccancctaggggcctctcacacaaccccatcntttcaccacanaagaacacantgccgatgtgccnatgcttccaatcaccangacccaanggttgccnacaccttggtccaanatgtgggatcaaaatggggtggattatnttnaggggggctnacttctaaatttnaacaagcctgaaactttcactggggaaaatacttttttaaccccactctaangnattccattananatgacatccattttnaanttanaagacatgtttttacctaaaaaatanatgaaaaangcttngnnttnaaaaatgggaaaaacctattgctttccccnaatnccnnaannnnnaatttttttcctttaaancnttnngcannaaanaaacttttncttttnattnanacnnccttttttttaatttt

SEQ ID NO: 1325 - DNA, 437 bp, Homo sapiens
  misc_feature 30, 41, 53, 62, 68, 95, 96, 260, 267, 270, 283, 289, 291,298, 316, 320, 326, 331, 338, 345, 351, 356, 369, 392, 394,395, 398, 417, 421: n = A,T,C or G
ccctttcgagcggccgcccgggcaggtacncgggataactnttcatgggaatnagatttatntcccanatttaaaagcaaaagctcataacagcnnggatttcacttaaaggaaatacttctgaacatgttgttaaaatattgaagaactaaggccaagatgttctgttcattataaaagtggacttcactagttccaatggtatattattttcagtggatcaaatatatctcatatgctggacttttaatgtctggacnccatatnttntggaagggcattnatttantnttattgnggatattttcattttatnttancacacnagacnattactncaagcangaatcncccanagaatgagaaaangctcctggtcctcagagggcatngnnaantaggacaggccaagacatnattnttttgacttgggcttt

SEQ ID NO: 1326 - DNA, 245 bp, Homo sapiens
  misc_feature 14, 21, 68, 171, 194, 224, 232: n = A,T,C or G
tatctgcagaattntcccttngcgggcgcccgggcaggtacagacctggaggcccaaacagccagccnaatcttgctgtattttatccaccatagtataatccagagactgtggaccccaaattgggatgcttttaaaatccaaagaagttctgtatacacatttgaaganaaatgctgttgaagaaatgtatncataaaacacttcaggtcaaaaagcaaaanaatatcangaaaaagtttaaa

SEQ ID NO: 1327 - DNA, 697 bp, Homo sapiens
  misc_feature 1, 25, 51, 64, 73, 93, 118, 130, 139, 149, 156, 179, 197,199, 201, 205, 209, 214, 225, 236, 265, 268, 270, 272, 273,305, 313, 319, 333, 334, 340, 344, 366, 380, 386, 388, 390,391, 399, 400, 401, 407, 411, 417, 420, 425, 429, 430: n = A,T,C or G
  misc_feature 438, 444, 466, 480, 498, 503, 504, 508, 511, 517, 525, 527,537, 549, 550, 555, 564, 566, 584, 585, 587, 591, 592, 600,602, 612, 615, 636, 641, 644, 668, 676, 679, 681, 683, 685: n = A,T,C or G
ngaggaatgatgagctctctaattntctcctacacaacatttcttatcaangccctggatcccnacctatganagccttccagggatgcccanggtaaaccaaatggggctgaccatntgcccattgttnggggagtgnagttgaaaantaaaggnagcccggtcccctttaacttaanggtgagccccttacaatnangngggnaccncaaanctatttcatanatccccccctnccttttttgggttcctttggcggaattgnggncnannaatggaaaatggggcttttcgtggggataaanacttttanaaattnttttcaaccttttnnttgggntttncaaggggggaattccaaaaagncccccccaaaattnctaaanangnnaaaatttnnnaacctnaaancagggnagntccanatgnnaccccggncgattnccccaaccaaaaaaaaaaaatnggccctttcaaatnggtttggccttggaaacncccanngggnaanataggnaaagtttncncttaaccaanaaaagcccaagnncgganaaagggggncncccttcgggaactttttnntnaggnnatttttananataaaacggntantggtttttaaagggggctttnaacgnggnaaccaaaaggggcctttttcaaanaaaaaagngtntncnanggaacttccccc

SEQ ID NO: 1328 - DNA, 469 bp, Homo sapiens
  misc_feature 14, 16, 17, 19, 21, 22, 28, 42, 49, 63, 74, 75, 80, 109,112, 123, 126, 127, 130, 141, 148, 157, 169, 234, 236, 238,249, 288, 315, 352, 384, 415, 419, 422: n = A,T,C or G
tccgggctatggtngnncntnnagcttntgcagccacccctntgctctnttttctgccctggnccctcttctcnnctccnagagcaccatgccttccatacaaggtggncanccctgttgctnctnnagnctgcacccttncacaccnttctttctnatgacattccanctgtctggaatatgggcttcccaccctcccattcacctaccctctcacctggtgagcttactgtntngngcccagctcanacgatatggttgaagaataggtgtcaccttcatctgagnactcatagcatatttcttatacctganagtaaacaattgcatgtcattatatggcatttaagtntgtctccttagatagcctctaagtcccttganggcagggactatatcttattcatctatttgncctnagnactactcagtgcccagccatagtaggtgtccaataaatatttcaatg

SEQ ID NO: 1329 - DNA, 593 bp, Homo sapiens
  misc_feature 14, 24, 43, 47, 64, 66, 77, 81, 98, 103, 114, 153, 161, 166,185, 190, 191, 194, 200, 204, 231, 238, 260, 274, 278, 291,293, 320, 323, 325, 326, 333, 341, 346, 358, 375, 377, 379,398, 406, 421, 426, 430, 446, 451, 455, 457, 458: n = A,T,C or G
  misc_feature 477, 480, 499, 503, 504, 521, 534, 537, 544, 557, 565, 571,580: n = A,T,C or G
ccatttgtccccanatggtatagngttaaaaaaagggggtaangccntttaacttggggtgtgntncccttccccgnaatntcccaagcggttttaantaaantcggtaagcgnaaggggttctcgccggcggccttaaggggaaggttccanattaacanaagcntgtaattctcgggggcctnttaannatngggggncccngaaaaaaataactttaaattggccctntcttggnttcggtcttttgggggaaattnatttaattggcggnaagngggaattcggggngngggaaatcttcaattttcggcctttanggngnnaattganaaaggggnaattnggggaatttaanggttaaaaatttaaggngngncccaaaagggggaaccccncccccttnccccttaaagatttnttcgntttnaaggggggggaccccnggaantccngnngaaaaaaaaattttgggtnggnttaagggcccccgaaaaanttanngggaaccccccccgccnggtttaccccctntgnccccccnggggggccggggnccccggcntttccnaaaaaaaanggggggcccggaa

SEQ ID NO: 1330 - DNA, 605 bp, Homo sapiens
  misc_feature 237, 250, 255, 256, 261, 262, 264, 267, 274, 279, 280, 291,294, 302, 303, 314, 317, 319, 345, 426, 430, 431, 497, 498,520, 530, 560, 568, 569, 570, 601: n = A,T,C or G
acctattaacatcactcagctgctgtgaaataggcttacaggcaacatggagtgtcaattacccaatgtttaaagtcgatcatacagattggactacaatctctatggctcataaagtctttaaaggattgacagatgatttatctcatatgtagacaatgattctcagcagttaactagcgcaacttgataatatcaattgcttgagaaaatcagataattgcttgagaaaattangacattgcttgangaagnnccgtnntnaantaaattncttcnntgaaggaactngtnaaccatcnnggaaaggacanctncnggcttgggaatgggggaccttgaatnatgctgcttcaaaaattctggcagcaataacatgtttaattatgaaaaataatgttggaaacaattcaattttctaggcanaatnnttcaaaaaagatttcgaggcagtcaataaaatctgttccatttaaaaggatcacctccaatgccanngtacaaagactgccccaatccnaacttgcgtngtttggggggaacctgcttcataaggtcanggggcccnnntcttgggaacacaaatgcccaatcctttccntttt

SEQ ID NO: 1331 - DNA, 378 bp, Homo sapiens
ccctttcgagcggccgcccgggcaggtacaagtatcttaggctactggaccgggcaggctttactgaggggctccgtgcagcttgctggtgcagccgagcaagtgggcctgtagccgactcttaatccaggttggtgctattcaaagagatcatctttcacccgagggatttctgggcacctattttgcggatcagaaagtagagaaagaaggtaactttgctgaaagctagtctggggagttagtagctgatacagatcagcatttcctaactatgagatttcataatattctctcttgtctcgattctgagtcactggtgcctgctgtggtggcattgttcatgaacatgtacctcggccgcgaccacgctaaggg

SEQ ID NO: 1332 - DNA, 447 bp, Homo sapiens
ccctttcgagcggccgcccgggcaggtacagaagggccatgctgttattactcttacacaaggaggcagccctcgagccacagggtccagctgttggctataatagcctaccggtctctgatgatcaccatgtttctggaattcaagccaggaagaagcagcaatctgtcttctggattaaaactgaagatcaacctactttcaacttactaagaaaggggatcatggacattgaagcatatcttgaaagaattggctataagaagtctaggaacaaattggacttggaaacattaactgacattcttcaacaccagatccgagctgttccctttgagaaccttaacatccattgtggggatgccatggacttaggcttagaggccatttttgatcaagttgtgagaagaaatcggggtggatggtgtctccaggtcaatcatcttc

SEQ ID NO: 1333 - DNA, 378 bp, Homo sapiens
  misc_feature 86, 148, 188, 199, 205, 214, 218, 239, 257, 272, 309, 322,356, 358, 361: n = A,T,C or G
ccctttcgagcggccgcccgggcaggtaccgcgggaaatgtataccgctgggaatcactaattttcccattcctggagagcctggntttccacttaacgcaatttatgccaaacctgcaaacaaacagggaagatgaagtgatgagancctatttacaaccagctaaggcaagagactgggactgagnactttgggaanaaagtnttcgacccntcangaatgataaaacccagcaagngggtgggacttgctttgngaaagagacagtttnaatggaacaagaagttctttttcaaggacccttgggnccaggtggaaaanggggaaggcccccggggccaaggcccaccccggngnttntccaggaaacccccctg

SEQ ID NO: 1334 - DNA, 533 bp, Homo sapiens
  misc_feature 117, 118, 120, 218, 225, 288, 310, 313, 314, 317, 318, 319,322, 324, 328, 334, 354, 355, 360, 363, 372, 379, 382, 388,393, 394, 405, 406, 420, 426, 427, 431, 436, 439, 440, 461,465, 468, 485, 486, 515: n = A,T,C or G
ggggaggcattgaggcagccagcgcaggggcttctgctgagggggcaggcggagcttgaggaaaccgcagataagtttttttctctttgaaagatagagattaatacaactacttanncnaatataatcaataggttactaagatattgcttagccgttaagtttttaacgtaattttaatagcttaagattttaagaagaaaatatgaagacttagnagaagtngcatgaggaaggaaaagatgaaaggtttctaaaacatgaccggaggtttggagatgaagcttnttcatgggagtaaaaaaatgtnttnnaannngananttgngagganaggggctactagagcccccnnaattnatnccaaattanaaagggnccngtgctntttannaattaaaaatnnaaagggtggacttnaaaccnngctntaaangtnntaagtttaaaaaagtttgggngggnggnatttaaaaaataaaatnntggaaagggcgaatcctttttaaaaaaangagaatttaaacccccga

SEQ ID NO: 1335 - DNA, 228 bp, Homo sapiens
  misc_feature 58, 106, 160, 172, 205: n = A,T,C or G
ccctttcgagcggccgcccgggcaggtacacatgtccaaggtcaggtcctgggtggtnaaggtaaatacaaattggaagggcactgtgtgagccaaaatgagtcanattagtcatgattcatttccagtttgggttttgggtggtcttggagaatgttgnaagcactgcttnattgataggttgattgagccagactttactcancagcctggaaaaggagagatggg

SEQ ID NO: 1336 - DNA, 708 bp, Homo sapiens
  misc_feature 524, 566, 567, 578, 582, 598, 608, 615, 643, 644, 646, 663,675, 686, 691, 706: n = A,T,C or G
ccctttcgagcggccgcccgggcaggtacccatataaatcccaaacccccagctccaaaaggagatgaatagaagagcagaagaatgcagagtggcaaggcaaagaatgggagaagagaaggagcatctgaaagttgagaggagttgggctggggacggtccgagaggagattggccgctggatggccaaattccaggagaaaaataatctcactccatcccccttccagctgcccatccaccctgctgagagccacttccatcactcaataaaacccccacattcatcctttaagtctgtgcgacttgacttcctggataccaaaaaattacctgggtcccaagagggcacccgagctggttacacttcttcagctgtcttcagatggcaaatctaaaagagcacacttgtacacacacccacttgggcttttaaggaagtcacaggcacccacccttaagatcctaccttggggcttggagccccaaggcacttcgcctggggtttggttgaccctgccctntcaagcaatgcctcccctgtcctggcaaaaagggcccttgannaaattgttgtnggtngggcccaaacaagatngagccaaacnccccttnttcggcaccgtttccttggcaaaagtgnntnaaagggacctttttccncttctccaaatntaatttccccnccttncctttttgggttttnaa

SEQ ID NO: 1337 - DNA, 419 bp, Homo sapiens
cccttagcgtggtcgcggccgaggtacgcgggtgagatactcccatcagaatccaaacaaaaggactatgaagaaaattcttgggatactgagagtctctgtgagactgtttcacagaaggatgtgtgtttacccaaggctgcgcatcaaaaagaaatagataaaataaatggaaaattagaagggtctcctgttaaagatggtcttctgaaggctaactgcggaatgaaagtttctattccaactaaagccttagaattgatggacatgcaaactttcaaagcagagcctcccgagaagccatctgccttcgagcctgccattgaaatgcaaaagtctgttccaaataaagccttggaattgaagaatgaacaaacattgagagcagatgagatactcccatcagaatccaaacaaaa

SEQ ID NO: 1338 - DNA, 272 bp, Homo sapiens; identical to SEQ ID NO: 1293

SEQ ID NO: 1339 - DNA, 369 bp, Homo sapiens
acgcggggagagacaaaaacagaagaggggaaacatgtttcctactgacgacaggtgattacacgtgtgcttctgatggagggatcaggaaaggatatgaaaaatcccgaagcttaaacaacatagcgggcttgacaggcaatgctctgaggctctctccagtaacatcaccctacaactctccttgtcctctgaggcgctctcgatctcccatcccatctatcttgtaaaccaaacaaccaaactgcatcagtcggctaaattgtattaattcaagtgctgtttaccccataatggaaataattaaatgtagagttactccaggctccattaatacagtataaatcttgcatgatactacaatttgaa

SEQ ID NO: 1340 - DNA, 517 bp, Homo sapiens
  misc_feature 14, 99, 230, 298, 438, 476, 477, 479, 483, 486, 496, 498,501: n = A,T,C or G
ccctttcgagcggncgcccgggcaggtaccactgtgcctagctgaaacatcagtttctgactgaagtggagactacaacaactttagtgtttcccttanaaggattacggccatggggaacttgactgagtaaacaatgctataaataaaaagctcttccaaaacattaaccatggtaagcatcattatccccataaaatggtggcatccaggttaaaatggcccaccangaccaaaagtctaaaatggaagataggaatccagtccgttaaacttttttctgtatctccatccgggngtgggtcaccaaagggatttaccaaatgcctttcctttagcatttaaatttcaatcctggggaaaaaatttttaatctcccgttgccaataattcccagtggagctcttcacccaataccttatttccttttaatttggngggggggtctggcaaccgggggcctttcccaaaagganncnaagnagngggattaaangnagnaaccttgggttttttt

SEQ ID NO: 1341 - DNA, 726 bp, Homo sapiens
  misc_feature 268, 408, 491, 496, 513, 548, 568, 580, 586, 600, 603, 608,617, 634, 639, 648, 651, 652, 657, 663, 683, 688, 690, 692,694, 699, 701, 713: n = A,T,C or G
ccctttcgagcggccgcccgggcaggtaccacagacaggcgcaagagggaggaagaaactataaaccgaaaaagaaactgacaaacttctctaattgggaatttacatgcagagagtgagagaagatacatctccccataaaaggattgagaggctgtcagattctctggctgtgctgtttggtgaaggtcttcccctatagaaagccagtatgtaaagattgagagaggtggctatttttcaaatgcaaaaatcacaacaaaaaatnacaaggcacacaaagaaacagggaaatcagtcaaagaaacaaaataaatctccattaactgactccgaagaaacagagatctattagttacctgaaaaagaatttatgataatcttaaagaagctcaatgtgtttcaagnagaataccagatagacagcttaaaatggaaatcaggccaaaccaaaggcattgaacaggaattgagggatattgaacccaagnatttnggaaaacttttaaaaanaggaacccaacttggaaatttcttggagcctgaanaaaaaacaacctgggtttanggaaaaaatttnacttgnggggaagaacccanccnaaggnggactttgntccaaccaggggaaaanaaatncagccttanctnnaaaangaccanagttcatttttgaaaaattntttgngntncnggagntnacccaccccccnaaaaaaaaaaaaa

SEQ ID NO: 1342 - DNA, 506 bp, Homo sapiens
  misc_feature 245, 276, 297, 342, 354, 392, 405, 408, 422, 424, 438, 441,466, 471, 476: n = A,T,C or G
ccctttcgagcggccgcccgggcaggtacgcggggaggcattgaggcagccagcgcaggggcttctgctgagggggcaggcggagcttgaggaaacccgcagataagttcttttctctttgaaaggatagagattaatacaactacttaaaaaatatagtcaataggttactaagatattgcttagcgttaagttttttaacgcaatttttaataagcttaagatttttaagagtaaaatattgnaattactttagaaaggagttagcaatggagnggaaagggaaaaaggaattanaaaagggtttttctaaaaaaccattgaccgggaagggtttgaagnattggaaaggcntttccttttcattgggaggttaaaaaaaaaactgttcntttttaaaaaaanggnaaaaaattttggangnaggaaaaagggaanttnccaaggaagccccccggaaattttnattanccccnaaattacgaaaagggggcccaattggcctt

SEQ ID NO: 1343 - DNA, 417 bp, Homo sapiens
  misc_feature 63, 98, 111, 133, 136, 138, 139, 170, 172, 177, 183, 227,282, 298, 325, 355, 360, 391, 394, 405, 414: n = A,T,C or G
cccttagcgtggtcgcggccgaggtactttttttttttttttttttttttttttttttttacntcattactttttattttgaaagatttgtgaaactnttcacatcatggngagagtttgtttgattaataanaancnnctttttcatagaaatgctttggaggtgaacnanttctnagcctntgagaatcccgaccatcccattaactttggaagtttctctttgnttaaataggaaggaaacaacagggggaggggttgaaaaaaaaagggagggaaccntgcctaaaaaaccttnttgacaatcattcccaaatgttgaggnaaaagaaacaaccccggattcacccaaacntcccncctttttttcttatttttaccaaccttttcntanaattttcaacnttcttttgnatt

SEQ ID NO: 1344 - DNA, 628 bp, Homo sapiens
  misc_feature 198, 350, 402, 465, 481, 486, 501, 520, 522, 532, 538, 541,542, 554, 602, 613, 618: n = A,T,C or G
ggtacgaaagagagacaaaagggttctcttggaaacaagaagagtgactccagatgtggcctgaataattgccatgttaagttaatgcaaaagatcagaacagggctacatttgcacaggcagtttctctccgggccgtagttttcactgatgatcacctttcacagcattttccccaaccaagcatttcacttaagncttctctatacccagcacctcccccggcacccccggcaagccccacttatcacttcccgacttccaacgtgggcattcccgtggagaatctggtccacatttagggccgaagccagggagaacacttggagaagcagcagggatggggtttnggaaaaagagcaatgccttttggggaaacaccagctttcctggggaatttcnacattgaggccaaggtccttacagaaggagccaaagaatgcaccccccagggattttctttcnattttttcttaattanatgtnggggaggtggcttcncattttttcccccggacangnggaaattttncccctngannaaaaccgattancttagaccccttggggttttggccccacccttttggtaaacttctttncctttatcttnccttnctttttttca

SEQ ID NO: 1345 - DNA, 348 bp, Homo sapiens
  misc_feature 340: n = A,T,C or G
ggtactttaccctgcacagatgccctccttgccccactcaagctccaacacctggaactgaatagtcttcctgtatagataccctccccaccctacttggactctggcatctttgtctgggtagctttttcccaaggtggtaggttgcttgataggtgcttagtaaatatcatatttgattaactttttgtagcctcctctttagtctagaaattctagatcccaaatagaaggtaagatatggtatattctggacttttagttttctatatctccttttcaaatacaagacctagggtgacagacaaaaaaatattgtgatcaaagtatatagcatttnctttcatg

SEQ ID NO: 1346 - DNA, 701 bp, Homo sapiens
  misc_feature 8, 21, 23, 25, 28, 33, 34, 35, 36, 37, 38, 42, 43, 44, 46,47, 53, 56, 62, 64, 77, 93, 109, 115, 119, 120, 122, 128,138, 140, 144, 149, 150, 158, 174, 179, 180, 183, 187, 202,204, 211, 212, 213, 214, 215, 223, 226, 229, 231, 234: n = A,T,C or G
  misc_feature 242, 247, 253, 256, 257, 258, 262, 299, 306, 308, 313, 319,322, 356, 371, 372, 373, 385, 396, 398, 399, 407, 408, 411,415, 422, 425, 433, 439, 442, 447, 449, 451, 452, 456, 460,461, 462, 464, 472, 474, 484, 486, 488, 490, 491, 492: n = A,T,C or G
  misc_feature 496, 497, 499, 502, 505, 506, 509, 533, 554, 557, 558, 571,573, 588, 594, 599, 601, 602, 603, 604, 609, 611, 620, 627,645, 648, 652, 660, 662, 663, 690, 696: n = A,T,C or G
ccctttcnagcggcccgcccngncnggnacttnnnnnncacnnncnntatggnctnagaaangngggccccattttncaccctagctacaaangggtgagtttgaaaantatgtnagannanctggangctcaggggncngatnctctnntggataanaccattcaaagccaanggtcnngangccnacgagcccatactgntnataaatnnnnnccaaaaantgnccntnttntttggggnccgcngagganatnnngccntggggctaaccaaaatattaaatagcggtccttgaangtgtacngngcccnggcggncgntccaaagggcgaattccaacacacttttaaaaantactacccggatccnnnctcttttcaatnttggcctaatnanngttttagnngtntaangaagganaantttttttnccgggnctnaaaantngnngggntttnnngnaaaaaaanantttttttccnananannntttnntnttnggnnccnccccaaaaaaaaaaaaaaggcccngttttccccttgggggggggntcnnaaaaaatctttcnanttttttttttttttngaaatnaaggntnnnnccccngnaaacccttnaaaaaanggggttttttaaaaaaanccnccgngggggaantnntttaaaattttaaaaaacctttttaangggggngtttt

SEQ ID NO: 1347 - DNA, 245 bp, Homo sapiens
  misc_feature 6, 28, 53, 56, 69, 86, 87, 93, 107, 127, 128, 159, 167, 181,182, 189, 202, 205, 206, 207, 222, 232, 233: n = A,T,C or G
cccttnggccggccgggcaggtacatcngtcccttgaccattacacccacggnggncctaattggcctntctggtttccaggcatnngggganagagcctggaaacnctggggcattgccatgctgnngtggaaacatatcccctcatcccaccactgnggggcatnctgtaggaacattnncagactncatgagataatgnttnnnaataataacaatggnctgacagttnnaactttatttgc

SEQ ID NO: 1348 - DNA, 697 bp, Homo sapiens
  misc_feature 17, 35, 55, 63, 70, 92, 103, 108, 109, 116, 119, 123, 126,131, 133, 136, 140, 141, 158, 178, 191, 192, 195, 198, 201,213, 216, 226, 230, 250, 256, 262, 268, 275, 294, 298, 301,304, 308, 333, 339, 342, 344, 355, 358, 374, 382, 385: n = A,T,C or G
  misc_feature 389, 398, 402, 410, 415, 423, 448, 465, 468, 479, 485, 487,494, 496, 511, 517, 524, 529, 535, 539, 556, 558, 574, 576,582, 588, 590, 600, 602, 622, 625, 635, 636, 643, 644, 654,656, 662, 686, 693: n = A,T,C or G
ccaggttacttgaaatnatatgggtatcaaagtanccattggagaaacttgtggnaatgtctntggtggnatctgtaaaaagaagatttcancttagctcatngggcnnggggcangangaantanagganantgnaatnngggacagaaaaattacngcctggacttaccagattgngcttggcattttnncgnctnagnaggggccccttnaanaataattttncttntcctggtgattacaaggggnaaaaanaatttngtacanaataagnggaagggccataaaaattnggcnaangcnttgnccacaagaggaaccatttatattanaacaanttnanccaggtaaggntgnaagaaattttggaatnttccttanaanaaanttgggtttntttnattgggtnaaaanaaaattantttttaaaattttttttattaaccntccattttggaggttanttnaccaaaataanagtggnanattaatntnccttccttttaaaanaaattncccacanttatnattcanattntactttttttcccaaantnttcaccacaaaaaaantngggaangttaananaaaaaattantnattggtctcccttttttttntanggggaataannaaattgnntccaggggananttaaanaattggaattaaaattaccacttncaattantttc

SEQ ID NO: 1349 - DNA, 429 bp, Homo sapiens
  misc_feature 31, 46, 47, 51, 54, 55, 57, 59, 60, 63, 66, 67, 70, 73, 75,78, 81, 84, 87, 90, 99, 122, 123, 129, 130, 131, 141, 153,154, 155, 157, 158, 170, 186, 187, 199, 217, 218, 232, 243,254, 257, 268, 270, 273, 277, 288, 299, 303, 308, 310: n = A,T,C or G
  misc_feature 316, 317, 318, 324, 326, 329, 340, 360, 364, 368, 373, 382,383, 386, 387, 389, 398, 402, 404, 405: n = A,T,C or G
ccctttcgagcggccgcccgggcaggtactnttttttttttttttnncccnccnnantnncanttnnttnggngnacngtnaanggncgngccaaaatnaagaaagcacccttttttccaannaaagannnccattaaagncccacgtccatnnncnnggggtacttggntaaaaaataaacaaannttttaactgggnttggaaaaaaaaaaaacnnagggtcccccaggnaaaaggcaatnttttttttttntcnaaaaaaagcgnangtncccntaagtttgccnataaaaaaggnaggnccccngnaagggnnnccttgngnggnaaaaaaccctntttttttaaccctacgggtnaaanaaanttcangaaatttanntgnngnaaacatggncttngnnaaaacgggccggggaaaaaagggg

SEQ ID NO: 1350 - DNA, 437 bp, Homo sapiens
  misc_feature 2, 39, 44, 45, 59, 70, 73, 142, 151, 158, 185, 214, 220,245, 247, 294, 302, 306, 313, 319, 321, 322, 324, 326, 331,335, 340, 347, 348, 352, 355, 357, 365, 369, 370, 371, 373,374, 382, 407: n = A,T,C or G
anaattcgccctttcgagcggccgcccgggcaggtacanaaaannatggcctgccaaanctttttttttnttnttccaggaaaaacaggccacaaatgaatggtgtattacagattgtacacacatgaagagaaggtaatancgcactgcnaagcagnccggctctggggaagaacttcacgganccccttcttagagcagggagggggctttntcaaanaaatgttgaggctttctgctgcctngntctgccccaggcccccctccagggtacctcggccgtaaccacactangggcgaantccngcacacnggcggncnnancnacggnatcngatcntgggccnngacntgngngaaaaaanggcnnnanntcctttcntggcaccaactatgatgtctttganaaagatatgcttgggggcctgggaaattga

SEQ ID NO: 1351 - DNA, 209 bp, Homo sapiens
  misc_feature 6, 20, 22, 24, 27, 35, 50, 53, 59, 60, 61, 68, 72, 78, 81,89, 91, 109, 116, 119, 123, 125, 126, 134, 140, 141, 154,155, 161, 168, 173, 176: n = A,T,C or G
cccttnccagcggccgcccngncnggnactcgatnaaaagtttggaggcntgncacaannntggaaanaatntaatgntgnattgactntncagggttctattaatganaacacantcnaacnannttttgatntattannacagatgtataanncctatnatttttnaaatnagnatccacctgacatttatctctcattccatcagc

SEQ ID NO: 1352 - DNA, 429 bp, Homo sapiens
  misc_feature 9, 13, 15, 29, 31, 33, 41, 43, 44, 47, 53, 60, 61, 64, 65,77, 78, 80, 81, 82, 88, 89, 90, 92, 102, 104, 107, 109,110, 111, 113, 121, 125, 132, 135, 145, 151, 152, 160, 171,172, 176, 179, 186, 187, 194, 197, 198, 199, 201, 204, 205: n = A,T,C or G
  misc_feature 206, 214, 223, 227, 229, 237, 245, 246, 250, 251, 257, 258,259, 260, 264, 269, 284, 286, 289, 290, 291, 296, 304, 305,309, 315, 317, 318, 322, 327, 337, 338, 344, 345, 346, 359,369, 375, 378, 381, 382, 384, 386, 393, 418, 422: n = A,T,C or G
cccttagcntggncncggccgacgtactntntntttttttntnntgntaaagnaaggggnnccnncctataaacccnngnnngaatcnnngnggccaccttngnggncnnnangctcctancccnagggaanaanccaatgttcnggactnncccccccnaaaaagggggnntaanggnccccccnnccttccnggnnnanttnnnattttttnacaaaaaangggntnccccattnggccgggnngganntaaaannnnaaanaaaanttccccccccgggangnccnnnaaaanggtggggnntaanagctgntnncccnccctnccgggggganncaaaannncctttttaggganggggccttcntttggnccnaanntntntttttgnaaaaggcccctaaaatttttcccanaaanctttttt

SEQ ID NO: 1353 - DNA, 338 bp, Homo sapiens
  misc_feature 1, 139, 287, 312: n = A,T,C or G
ncccttagcgtggtcgcggccgaggtactacagaggacatagcagtattaagggataatgaagtcacagcttcagagcctccatcctttctttagcaagttagctctacttgtatctgttctgttttatataatatggntgcatctaactgtttttaaaaaaagttctgttcttcaaaaaaattttaagctatgaaaatcactgattaagtcaaaccctcattttacaaaagaggcaacacaaactcagagcacttatgcctcaccataggtcacaaagccaagtanctccaggccagaaaatgggctttangtcttcccgtctgagactggcatttg

SEQ ID NO: 1354 - DNA, 143 bp, Homo sapiens
  misc_feature 34, 55, 60, 64, 66, 70, 75, 77, 83, 86, 91, 92, 98, 100,102, 103, 106, 110, 120, 123, 128: n = A,T,C or G
cccttagcgtggtcgcggccgaggtaccgcccantcttttacatggtgatggganacacncttnangcanacttnangtctanttntgccnncataantntnnctnaacngatttacggnacnctccnccagatttcataatt

SEQ ID NO: 1355 - DNA, 652 bp, Homo sapiens
  misc_feature 44, 45, 46, 48, 51, 52, 55, 66, 68, 69, 72, 73, 75, 77, 79,83, 85, 87, 88, 97, 98, 101, 102, 104, 109, 119, 120, 128,130, 142, 148, 149, 150, 151, 153, 159, 160, 164, 168, 183,190, 196, 197, 202, 211, 216, 220, 223, 224, 225, 226: n = A,T,C or G
  misc_feature 227, 230, 232, 233, 250, 252, 256, 259, 260, 261, 270, 271,274, 279, 284, 288, 289, 290, 293, 296, 297, 298, 299, 301,306, 317, 318, 322, 324, 325, 326, 328, 331, 333, 338, 339,344, 345, 352, 358, 359, 361, 366, 371, 372, 373, 377: n = A,T,C or G
  misc_feature 379, 392, 395, 398, 399, 411, 413, 426, 427, 437, 440, 442,444, 452, 458, 464, 465, 472, 474, 480, 490, 492, 505, 510,520, 524, 529, 535, 542, 548, 549, 550, 551, 554, 558, 560,571, 573, 580, 581, 583, 588, 596, 597, 612, 616, 617: n = A,T,C or G
  misc_feature 626, 633: n = A,T,C or G
cccttagcgtggtcgcggccgaggtacttttttttttttttttnnnanttnnccnttggccccccngnnggnngncnangggngnannccaacctannggnnanatttnccccccgggnnaaaaaaantncccccccccaancccccnnnnangggggnntaangggnccccccccccccccnaaaaaanttttgnnttttnaaaaaaaanggggntttnccnnnnnggncnnggggggtttaaaacccngncccnagnnnaaccccccnnccnaaccntgggntttnnnttnttnnnnanttttngggaacccccnngggntnnncnaananttaanngggtnnggggccnaaaaanngnccccnggggnnncccnangggccttttaaanggnccnnccaaattttttngnaaaccctcttttnnaacccaaaanggncntnaaattaangggggngggggnnccccaancntaagangggggaaagngncccttttaccccnctttntaaaattttntttnaaccnggggcnaaaaagntttttnnnnaangggnanccaaatttttntnttttttnnanaaaanttttcccnngaaaaaaaaaaaaanacgnnggggaaaanacccggngtttagaaaaaaaaaaaaa

SEQ ID NO: 1356 - DNA, 174 bp, Homo sapiens
  misc_feature 55, 57, 59, 61, 67, 69, 75, 76, 78, 79, 83, 87, 88, 98, 100,102, 109, 110, 111, 119, 124, 125, 127, 128, 132, 139, 140,165: n = A,T,C or G
cccttagcgtggtcgcggccgaggtactttttttttgttttttttttttttaaancntngnaaaatntntttttnntnncccnggannaaacccaccntntnttagggnnnaaataaantaaanncnntccngtttttnnttttaatccctttaaaaaagggaancaaaaaaaa

SEQ ID NO: 1357 - DNA, 331 bp, Homo sapiens
  misc_feature 53, 54, 55, 57, 59, 62, 63, 70, 74, 75, 76, 88, 90, 91, 92,97, 110, 112, 113, 116, 128, 132, 134, 135, 136, 137, 139,142, 147, 151, 156, 157, 160, 161, 162, 163, 166, 172, 173,175, 181, 183, 190, 195, 199, 202, 209, 212, 213, 215: n = A,T,C or G
  misc_feature 221, 230, 231, 239, 246, 255, 257, 268, 281, 282, 295, 299,313, 316, 327: n = A,T,C or G
ccctttcgagcggccgcccgggcaggtactttttttttttttttttttttttnnnangnccnnaaggggnaaannnttttttaaaaancnnnttttnccaaaattttggncnnaanttcccttttaantttncnnnntnggnaaaangggnttttnnccnnnnaancctaanntnaagggncnaaatttnttttnaaanttnaaaaaanccnncnaaaaanctttaaaanntttccccngggggcnttttttccntnccccaaaattntaaaaagggcctnntttttaaaggaantttnaaaaaagggggggnccngattttttttntttt

SEQ ID NO: 1358 - DNA, 128 bp, Homo sapiens
  misc_feature 1, 10, 12, 14, 18, 20, 21, 23, 37, 39, 43, 46, 54, 56, 72,73, 75, 77, 78, 99, 101, 113: n = A,T,C or G
ngtactgatntngnctgncnnanaggaatgtataatntnaggncgncccttatnangcatgatgctttaaanncntnntacaagtaactttttaaaacntnccctgaaacaanatgaggggacccatt

SEQ ID NO: 1359 - DNA, 579 bp, Homo sapiens
  misc_feature 199, 224, 230, 303, 319, 321, 343, 351, 361, 376, 378, 411,413, 418, 427, 453, 460, 475, 495, 496, 502, 503, 505, 509,529, 537, 540, 542, 552, 561, 566, 568, 571: n = A,T,C or G
cccttagcgtggtcgcggccgaggtactttcccacattccgggttgaagagagcctttcaaaagcatcaaagatggttccacaatgttcacatgtccactccttttattctcttctttcggcatgaagtcacttgagaaggatgaatttgtttggaggaatgctactttcaaatcctatatggggaggtatgatttttnattttttctaattcttttctcttanattaantttttatccaaaactttgtgaaaatgaatgggagcctaaaaaataccttgaaattcttgggaattcatttcangtccacccattggatngntttttccctaaatgggggggcnttcccccnaggggaggcnatttccttttaattncnctgaatttattggaggggtttttttgggttaancnccaangaaaggggncttaaaaaaaccccaaaatttgcctngggtggncttttttggccttanacccttcgggatgggccccnngggaannangggnttcaacccgggtttttttanaaaaaaangtngnaaaatgtccnattttccanggggnantanttttttgg

SEQ ID NO: 1360 - DNA, 442 bp, Homo sapiens
  misc_feature 37, 73, 78, 119, 121, 131, 175, 218, 229, 275, 288, 319,331, 335, 347, 379, 388, 413: n = A,T,C or G
cgcggggaggcattgaggcagtcagcgcaggggcttntgctgagggggcaggcggagcttgaggaaaccgcanataantttttttctctttgaaagatagagattaatacaactacttncnaaaatatagncaataggttactaagatattgcttagcgttaagtttttaacgtnattttaatagcttaagattttaagagaaaatatgaacacttanaaaagtagcantgaggaaggaaaagataaaaggtttctaaaaacatggaccggaggnttgaagatgaaancttcttcatgggagttaaaaaaatgtatttnaaaagaaaaatntganagaaaggggctnccaggagcccccggaattaaataccaaataangaaggggcnaatggcttttaagattaaaaatggnagggtgactcaaaacagcttaaaagtttt

SEQ ID NO: 1361 - DNA, 442 bp, Homo sapiens; identical to SEQ ID NO: 1360
  misc_feature 37, 73, 78, 119, 121, 131, 175, 218, 229, 275, 288, 319,331, 335, 347, 379, 388, 413: n = A,T,C or G

SEQ ID NO: 1362 - DNA, 495 bp, Homo sapiens
  misc_feature 13, 15, 18, 20, 21, 22, 34, 65, 67, 68, 69, 81, 89, 97, 101,105, 106, 120, 121, 123, 134, 135, 136, 139, 140, 141, 146,147, 153, 157, 162, 166, 181, 183, 190, 213, 220, 222, 226,227, 228, 232, 258, 259, 269, 270, 271, 272, 277: n = A,T,C or G
  misc_feature 279, 281, 294, 307, 310, 313, 314, 315, 316, 317, 319, 324,325, 337, 350, 351, 352, 353, 358, 359, 360, 361, 362, 365,366, 368, 385, 392, 398, 402, 411, 412, 429, 434, 439, 442,459, 460, 465, 467, 468, 469, 470, 477, 478, 493: n = A,T,C or G
agcggccgccagngngangnnnttcgggggaatnaaacccagcgcggccgcggccgagggacagngnnnaaaaagtgtacngaaacaanaaagcagncaancagnnaaaccccagagaanncngcagaaaaaannnatnnnctagnnacgggnaggnaaccncacnaaaatgtggaccgcntnttacccngaaaggaaaaaaaccccccgcanacaaccncnacannncagncacgcaaccacagggcaaagagaaannaagctccacnnnnaaaanancngaagcaggggggnaaaaggcccgagnggncannnnncngaaanncagagaagcaancaaagggcagaannnnggcannnnnccnnanagaagcaggggggagcnaaggagnggccancagngaggcaccnngccccaacaggaacccnggggnaaganaangggagggaccgcagccnngaaanannnncaccccnnaagccaccgggggcngg

SEQ ID NO: 1363 - DNA, 360 bp, Homo sapiens
ccctttcgagcggccgcccgggcaggtacagtcagggttttgtcatgttgtttaggctggttttgaacccctggactcaagcaatccacccaccttggcttcccaaagtgctgggattataggcatgagccactgcacccagccaattctccaaatctcacagccaaactgcaactaaattccatctcaaacaaatattcaaatgcagaagactcacccatctaatcaaggcagttttaatatttaggggaaaaaaaatgcctggataaaactgtaaaaccaagcatgatagaaagagatacttttaggaatgggggaggggatgacaaaaataaaacgagaaggtagataagaatggaa

SEQ ID NO: 1364 - DNA, 445 bp, Homo sapiens
  misc_feature 173, 340, 342, 403: n = A,T,C or G
cccttagcgtggtcgcggccgaggtactttttttctttcttttttctttttttttttttttaacaggaatcaagtaaaaaccacagaacctctatatttatatttgagtctgaatcaaacattttcacctggaagaattttttccaaaggaggggaaaacaactgtttctgantgcctttattttaggttaattttttcaaaagattatctctgacacctttgcattaagtatctaatgtattagtgggactccatggtttgcatttatttcttcaatttgctaaaaaaaaaaaaaagtctactaaaatttcaatttttgaaaagcaattaattagaatntnttagataaagcaaaatgtaataaactcttcacttattttttggatggaggtcctactggtnataagatttcaagttaaattttcctaaattgcccttttttaa

SEQ ID NO: 1365 - DNA, 149 bp, Homo sapiens
  misc_feature 17, 30, 32, 71, 72, 75, 77, 80, 85, 87, 89, 90, 91, 92, 101: n = A,T,C or G
ccctttcgagcggccgnccgggcaggtacncngggtgtgacccgagcggtaacatccagaaaggatttccnncananacngcgcngntnnnnagctgcagnttgccccaccctgatccagtctccctcatttacagcctggaaattgat

SEQ ID NO: 1366 - DNA, 334 bp, Homo sapiens
  misc_feature 207, 231, 243, 261, 289, 311, 325, 329: n = A,T,C or G
cggggaggcattgaggcagccagcgcaggggcttctgctgagggggcaggcggagcttgaggaaaccgcagataagtttttttctctttgaaagatagagattaatacaactacttaaaaaatatagtcaataggttactaaagatattgcttagcgttaagtttttaaccgtaattttaatagcttaagattttaaggagaaaatntgaaagactttataagagtagcantgagggaagggnaaaggataaaaaggtttntaaaaacatgaacgggagggttgaggangaaagccttcttcatgggagtnaaaaaaaaatgttntttnaaaaa

SEQ ID NO: 1367 - DNA, 334 bp, Homo sapiens; identical to SEQ ID NO: 1366
  misc_feature 207, 231, 243, 261, 289, 311, 325, 329: n = A,T,C or G

SEQ ID NO: 1368 - DNA, 430 bp, Homo sapiens
  misc_feature 1, 16, 129, 150, 157, 230, 234, 238, 266, 267, 273, 280,298, 308, 353: n = A,T,C or G
nccttagcgtggtcgnggccgaggtacagacaggcaggctcccagtgtgagaagtgcctttaggacaagtagaactgcacacatagatgcaaatgcctgggcctttcttcaggttctgtcatagaacanactgcctgaggccatgctcangactgcnggcctcagaaacccagcacttgcccctgctctgtctttctgctcccagcagctgaattctagggaaatgtctntccntcancccaccccgagacaaacctgccaagctnntggctntcaaatncttttgcccatgactgangtcccatcancccttttccccaatatgagaatagcttgttccacccctccaagtncagcaaggcatggggataactggaaaggctgttacacctgtatgctctcctgctccctaagcctgcctcaaaacatg

SEQ ID NO: 1369 - DNA, 432 bp, Homo sapiens
  misc_feature 293, 354, 374, 378, 424: n = A,T,C or G
ccctttcgagcggccgcccgggcaggtaccaacagaaacagaaataactgagcaaccgaaccaccaatagagctcttagattaagaaccttggttcaaggaaggagttttgagcaggtgctggacagaaagactgagaactctatgatgtaaatgagagccctgtgataagccaatcagcctgctgtggcctggaactgattgatcatgggccaggaaggagcacagaggggtaacctggcaaagaacaaaggaagaggtagccactggcggagaatgactaggacagaagangcccagaagagagctaggactgggaatcaaatttacatatggatgtctaagaaaactttangttcacaatgaggcttcttnttangcataacctgcagatgatcaagaatgcttttttttgcttggttggnttctaaat

SEQ ID NO: 1370 - DNA, 607 bp, Homo sapiens
  misc_feature 256, 349, 387, 390, 411, 421, 424, 426, 434, 457, 468, 472,493, 498, 512, 527, 529, 533, 534, 540, 543, 550, 557, 561,563, 567, 580, 593: n = A,T,C or G
ccctttcgagcggccgcccgggcaggtacactctttcttggtcatgtggcttccctgtttcttcacaattgcagctacattccctctcaatgctctgaaagtgtgggtgcctctccccctttagttctggctgtagacagtggtttggcactcctaggctgtctactgcagctctgggtgatcaatctaatgtttatgttccttccccagcttgtttgcagcagaggaaggaaccttagtagtggtcatggccaanggtcccttgctcatctcctggggactccactctagagatacacaggtcagcaattgttttggtgcaatcaagcctagggatggagggtctgtnctgtgggcccaaaccaagggggtccctgtctgatgatnaancaatggaagggttgttgtggnaaccacattnggnanaggggacntggccttctttctcccttggggnttgaattgcancccntgtttggaaagtggtgggatnaaaangcaccgttgggggncttttgattcttttngntaannccctgnaangggtaanccaaaanaacnantttntacttgcaaaaangcaattggggcanaaaaaagggttttt

SEQ ID NO: 1371 - DNA, 144 bp, Homo sapiens
  misc_feature 24, 30, 117: n = A,T,C or G
cccttagcgtggtcgcggcccgangtactntttttttttttttttttttttgtctgggtggtgacagctcatgataattcataaagttgtatactatgatttgtgcatattggatanatacgtcatagttcactttaaaagttt

SEQ ID NO: 1372 - DNA, 557 bp, Homo sapiens
  misc_feature 218, 243, 248, 277, 280, 291, 320, 322, 344, 345, 367, 375,384, 388, 437, 439, 441, 454, 478, 488, 511, 514, 527: n = A,T,C or G
ccctttcgagcggccgcccgggcaggtacaattccaggagcttccctgtaattcctcaaaaaagcactagtaaaactcttaggaggatattagataaagctcacttagcaatagccctttttccccacatattctggaaggttctataaaagctattagatactcattcctggttctggaaaattaaataagccaattcttggtaggattttccaaanggcttaccacaggagggattttatncctcntttttgaaaaatattttcatcccattaanagnaataaggaaancttcttgccctttcaataagccatttttnanaggcctttcctggttatttttnnttgggggaccaaaaaaaaattngttcttanaaaccaagnaaantttaagaattctttcccaggggtccttcaaaaaaaggccaccaaaggangnantatttattccaanggaggaaaaaattctttgggaagnttaaaaaccncaaaaaccaaaaaaaattcttgntanaaaaatggtgggngaaaaattggtacaatttcttcccttttcc

SEQ ID NO: 1373 - DNA, 389 bp, Homo sapiens
  misc_feature 47, 49, 50, 56, 57, 59, 67, 71, 72, 77, 79, 81, 83, 87, 88,91, 93, 98, 108, 110, 112, 130, 133, 135, 140, 148, 152,154, 162, 230, 255, 260, 277, 282, 287, 309, 313, 316, 320,333, 335, 347, 356, 361, 365, 371, 375, 376, 377: n = A,T,C or G
ccctttcgagcggccgcccgggcagggacttatttatattttatttntnncattgnntntttaaggnttgnnattgnantnantttnnaantnaattntaactgtttncngntttttcaatgtgtttatntantncatcngattttgnactnancgagcctncacaattatgtcaaaaagctaatatgtttgagaaccatctatttaaagaacagcaagtttggaccaanaaataaagaccaacggtgaaagcangcaanccccagaaataactagnaaaantgctnaaaaggaggaaccttttacttnatanganaatnaaaccatttgacngnaaaacttttttnaacactaanatttntatntttttnaaannnaccttttttttt

SEQ ID NO: 1374 - DNA, 385 bp, Homo sapiens
  misc_feature 33, 74, 164, 298, 333, 342, 353, 372: n = A,T,C or G
cccttagcgtggtcgcggccgaggtactttttntctttcttttttctttttttttttttaacaggaatcaagtnaaaaccacagaacctctatatttatatttgagtctgaatcaaacattttcacttggaagaattttttccaaagggggggaaaacaactgnttctgagtgcctttattttaggttaattttttcaaaagattatctctgacacctttgcattaagtatctaatgtattacgtgggactccatgggctgcatttatttcttcaatttgctaaaaaaaaaaaaaagnctactaaaatttcaatttttgaaaagcaattaatntgaaatatnttagataagcnaaaatgtaataaactcttncactatttttttg

SEQ ID NO: 1375 - DNA, 461 bp, Homo sapiens
  misc_feature 5, 14, 71, 74, 85, 142, 157, 168, 210, 211, 256, 262, 271,275, 279, 281, 294, 323, 324, 331, 345, 352, 371, 374, 389,391, 396, 398, 400, 415, 419, 420, 428, 429, 447, 456: n = A,T,C or G
accgngcctgcctntcaagataccccatcctctccacgccgctgccgctgccgccatgcaaggggaggacnccngatacctcaanaggtgacgactccccaacggctctgtcctaccctccttgccagggccctgaagatgntcttgggtttgctgngagatgtcacntgggcaaacgcttagcttattcactacgggatggggaaagcnnggagagtaagttcactcggaatagggaggaggggaaaaggtgaanatgggncaaaaaaangagnagcntntgggggggttttnaaaagtccctttgaccttgaactcggcgnnatccccntttcagcctttganaaagatnggggttcctttccgcttancantcaaccctttaattnancaagngngngaagaaggggaaggnttanntggccaannggtaaaaacccccccgcncctttttgnttttt

SEQ ID NO: 1376 - DNA, 323 bp, Homo sapiens
  misc_feature 49, 50, 51, 72, 74, 75, 76, 79, 80, 82, 83, 86, 92, 93, 99,100, 101, 102, 106, 117, 118, 121, 122, 126, 134, 141, 147,149, 152, 161, 163, 167, 170, 174, 175, 181, 182, 186, 187,188, 198, 201, 202, 204, 205, 212, 213, 214, 217, 219: n = A,T,C or G
  misc_feature 223, 231, 232, 238, 243, 255, 280, 283, 289, 298, 304, 311,315, 320: n = A,T,C or G
cccttagcgtggtcgcggccgaggtactttttttttttttttttttttnnnccccttttttttttttttttncnnnaanntnnttnaaaaannaaaaannnntttncccaaaaaaannaanncccnggggaaanggggccngggggnanaanttaaaaaanantttnaancccnncccccnntttnnntttaaaaatnttnnanngggggcnnnccntntcanaccttgcnnctgggnttatnaatttactgccnttccattgtattgaggtccctgaantcntggatnaccagaaangggganttttaanattncattnaat

SEQ ID NO: 1377 - DNA, 546 bp, Homo sapiens
  misc_feature 288, 293, 302, 330, 357, 399, 400, 418, 422, 426, 438, 442,446, 455, 464, 502, 511, 527: n = A,T,C or G
acttcatgaacgccaggaaagccttcaggctatcctcaacagaatggaggaggttcacaaggaggcaaactctgtgctgcagtggctggaatcaaaagaggaagtcctgaaatccatggatgccatgtcatctccaaccaaggacagaaacagtgaaagcccaagctgaatctaacaaggccttcctggctgagttggaacagaattctcccaaaaattcaaaaaagttaaaaggaagccctggctggatttactggtggacatatcccaactcacagggaaaaaagnattanaatgctttntggttaccttggcccgcggacccaccgnctaaggggcgaaattccagcacactgngcggcccgtttactagtgggatcccgaggctcggttccaaannctttgggccgtaaatcantggntcantagcttgttttnctgntggngaaaaattngtttattcnccgcttcaccaaatttcccccaccaaccattaaccgangccccgggnaaaggccattaaaaangtggttaaaagcccctggg

SEQ ID NO: 1378 - DNA, 471 bp, Homo sapiens
  misc_feature 163, 271, 274, 286, 302, 319, 323, 336, 340, 347, 356, 391,402, 444: n = A,T,C or G
ccctttcgagcggccgcccgggcaggtacattgaagctgcttaaataacccagtatctgaaaagctgtcctcttaacattgcattaataacaatataagctcaattttaaatgatgaaatatttcaccctccctagtttctgattttggcctctggagtaatnttaacttgatcagtaaacacacacattacatacatacattattacacacaccaaaggtttcattcattatttaagcaaggagaatcggattaccccttgtgttaattnatnattaaggaaaanttccaaaaaaaggtcnaaacctccagttaggcnatgncttaatggaaaantaanctaagtnatttcaaanaatccaaaaagggtgggaaaaaatttcaagcccancttgggggggnaccccttgaaaaaggggtttcccttcacttttccccttaagnaaattattattaaccatttttgggaaa

SEQ ID NO: 1379 - DNA, 788 bp, Homo sapiens
  misc_feature 96, 132, 323, 400, 466, 480, 494, 497, 500, 502, 504, 527,532, 534, 543, 570, 582, 597, 601, 605, 630, 647, 648, 654,663, 668, 686, 702, 714, 728, 730, 734, 738, 740, 743, 744,749, 764, 765, 766, 773, 778: n = A,T,C or G
cccttagcgtggtcgcggccgaggtactgctcggaggttgggttctgctccgaggtcgccccaaccgaaatttttaatgcaggtttggtagtttangacctgtgggtttgttaggtacgcggggggagtctncaggatggcaccggacccctggttctccacatacgattctacttgtcaaattgcccaagaaattgctgagaaaattcaacaacgaaatcaatatgaacgaaaaggtgaaaaggcaccaaagcttaccgtgacaatcagagctttgttgcagaacctgaaggaaaagatcgcccttttgaaggacttattgntaagagctgtgtcaacacatcagataacacagcttgaagggggaccgaaaacagaacctctttggatgatcttgtanctcgagagagactactttctggccattctttaagaatgagggtgccgaaccagatctaatcaggtncagcctgattagtngaagaggctaaacnagnagnancnaaacccttggctttttttagggngcccncnggaagaccnagaaggctttgggttttgattaaaatncgggcaacaagnaggcagaaaaaattnttcnaaanaacaaggatgccaagccctttgatnccccttttccttttatnnaaaaangttggccanaaaanaaaattggggggcaaggnaaatttggggaatttnaatttgggattnaaccaaaaatgagnantaantttngnccnnccttncccaaccttttgggnnnaaaacanaattnaaaaaatttt

SEQ ID NO: 1380 - DNA, 334 bp, Homo sapiens
  misc_feature 54, 55, 59, 61, 62, 63, 64, 65, 66, 75, 79, 80, 85, 89, 90,91, 92, 93, 98, 99, 103, 107, 108, 112, 115, 116, 119, 122,129, 131, 132, 136, 138, 139, 141, 142, 145, 146, 151, 152,155, 156, 158, 161, 167, 169, 170, 171, 172, 173, 182: n = A,T,C or G
  misc_feature 193, 194, 195, 211, 212, 225, 226, 231, 236, 240, 244, 248,250, 258, 268, 269, 270, 271, 282, 288, 289, 290, 293, 296,298, 303, 314, 334: n = A,T,C or G
cccttagcgtggtcgcggccgaggtactttttttttttttttttttttttttanngggntnnnnnnttttccccngggnngtttnaaannnnngggcnnaaanaaanncccnaannaanccnttaaaangnngggnannannggnnaaaannaanncnaanggcccnannnnnttttttttnaaaccaaaaannntttaaaaaaaaaaaannttttttttttaannaaaantaaancccngaangggntncctttttncccccggggnnnngaaaaaaaacnccttannnccnttnanacccngttttcccttngcccccccaaatttcaaaan

SEQ ID NO: 1381 - DNA, 422 bp, Homo sapiens
  misc_feature 58, 105, 265: n = A,T,C or G
ccctttcgagcggccgcccgggcaggtacttttttttttttttttttttttttatttncaatgcttcgtttctagctattctgtgctcatttccacctgaaaganaaaataatactatctatagctgagattcatattatggaatagtaatttattctatatctgtaacttttaaaaagtcataattacatcaatgcacatgtaagttaagggagttatttgtttttcaaagaaggcgtccacagttcgactttaaataagttgngtaggaacactacatctgttctcaagggattccaccaaatactttttggtgcttcctttaaaactgccaccagagccactttacaaggtataaacagggtttgggaggccctatattatacctcattttcacccaaacgtattgccctttgcatttt

SEQ ID NO: 1382 - DNA, 406 bp, Homo sapiens
  misc_feature 24, 29, 32, 50, 54, 67, 76, 79, 93, 99, 100, 126, 174, 238,244, 335, 347, 353: n = A,T,C or G
caattttggaaaattcccgcaagntaaancgnttttcagggagatttatntcgntttaatacccccntagcgaggncgngggcgatgtacaanaactanntggttgtggtggcgctcgcctgtagncccagctactcgggaggctgaggcaggataattgcttgaacctggcangcagaggttgcagtgagccgagatcgcagtcactgcactccagcctggcgacagagcgagactncgcctngggaaaaaaaaaaaaaatccttaacagctgagaatggctagagtttaggcgctgcacactggcaagcagctcctttgaccccaggcacttnactcctcatttntctctnaacaaggcagccagcaaggatcctggagtcacagggtgtgagatgcgaaaaaa

SEQ ID NO: 1383 - DNA, 393 bp, Homo sapiens
aggtaccaactgggaccgttgaaactgtttagcctttgtggcaagaaattccgatttcatttcaactcctgcttgttgtagaattgactttgccacaggtccaactgtaatatcatgtgggtttacagaattaacaattacatctgccgtctgccattcaatgtggccctggacaatctggagggtcaggttgttcacgaccattgcattgaaagaaggggtggtttcttgtcccagctcactcttccctaggatgaattctgaagcagctttaaaggcagcaacagtagggtcctcattgctcaccaggtgaatttctttcaaattactcatcattggcttccttgcaaactaacccggatagtctctacaatagtctttgtacctgcccgg

SEQ ID NO: 1384 - DNA, 274 bp, Homo sapiens
  misc_feature 1, 9, 18, 28, 29, 32, 33, 53, 56, 64, 66, 69, 77, 113, 115,117, 161, 173, 194, 198, 206, 219, 236, 242, 245, 248, 249,260: n = A,T,C or G
nccctttcnagcggccgnccgggcaggnncannttcactcacatgtggctctnggntgtattcngnagngggcatcntgacccacatgatcaaatgccccagagttcactctntntntgaagagctccgtgtctactaagaggtctgattccctacatgcnggccagtatgtnggaatgaaatgtgtcactaancgtnaaaataangcactagcaaatncagaaccttgaaaagtnaaactnatnccnnccaagggcttnatttttcaggggcc

SEQ ID NO: 1385 - DNA, 310 bp, Homo sapiens
ccctttcgagcggccgcccgggcaggtacgcggggaggcattgaggcagtcagcgcaggggcttctgctgagggggcaggcggagcttgaggaaaccgcagataagtttttttctctttgaaagatagagattaatacaactacttaaaaaatatagtcaataggttactaagatattgcttagcgttaagtttttaacgtaattttaatagcttaagattttaagagaaaatatgaagacttagaagagtagcatgaggaaaaaaaaaaaaaaaaaaaaaaggtacctcggccgcgaccacgctaaggg

SEQ ID NO: 1386 - DNA, 57 bp, Homo sapiens
cgctcacaattcccacacaacataccgaagccggaagcattaaagtgtaaaagcctg

SEQ ID NO: 1387 - DNA, 169 bp, Homo sapiens
  misc_feature 18, 20, 24, 26, 32, 33, 34, 35, 36, 42, 43, 48, 56, 61, 64,83, 90, 122, 125, 136, 143, 145, 147: n = A,T,C or G
cccttaccagcggccggncngacngncacttnnnnncactgnnggggnccattgtnactgncanggaatacttgaaaggtcangtaactnacacttctggagagaccattcaaggcttgtgnctnttgacaaaaanagaccantngngcaatgaaaaggagagaattct

SEQ ID NO: 1388 - DNA, 57 bp, Homo sapiens
cccttagcgtggtcgcggccgaggtacacagaacttgaaatttgcaaaagaaggaga

SEQ ID NO: 1389 - DNA, 46 bp, Homo sapiens
ccctttcgagcggcccgcccgggcaggtgctttttttttttttttt

SEQ ID NO: 1390 - DNA, 86 bp, Homo sapiens
  misc_feature 19, 32, 54, 60, 67: n = A,T,C or G
ttcccttagcgtggtcgcngccgacgtacacntggacctgctggcattcgaggncctcanggtcacnaaggccctgctggcccccc

SEQ ID NO: 1391 - DNA, 27 bp, Homo sapiens
  misc_feature 2: n = A,T,C or G
anaattcgcccttagcgtggtcgcggc

SEQ ID NO: 1392 - DNA, 86 bp, Homo sapiens
acattcatgttaatccagggagcaaggtaaagctgtcactttcattattcacatgaccacgaaaataaattgtatttttttttttt

SEQ ID NO: 1393 - DNA, 95 bp, Homo sapiens
  misc_feature 17, 18, 24, 26, 28, 37, 44, 45, 49, 53, 59, 66, 77, 81: n = A,T,C or G
cccttaccagcggccgnnccgacngncncaattactnctatttnnaatntacnaaggancaaacanctacaggattnaggncggaccgaatgggt

SEQ ID NO: 1394 - DNA, 74 bp, Homo sapiens
  misc_feature 21, 25, 34, 42, 62: n = A,T,C or G
agcgtggtcgcggccgaggtncatnctaacaaanatgaaatnctatgttaaatctactaacnctttgcctgcca

SEQ ID NO: 1395 - DNA, 151 bp, Homo sapiens
  misc_feature 59, 70, 99, 100: n = A,T,C or G
ccctttcgagcggccgcccgggcaggtactttttttttttttttttttttttttacggnttttatttttnaatttttattttggttttcttacaaaggnngacattttccataacaggtgtaagagtgttgaaaaaaaaaattcaaatttt

SEQ ID NO: 1396 - DNA, 90 bp, Homo sapiens
  misc_feature 14, 18, 23, 41, 42, 44, 63, 80: n = A,T,C or G
ggtatgcttgaccntagngctancatcttctttacaatttnnanaaggcagaggatgaagacnaaccaagaggctactgncattgaattt

SEQ ID NO: 1397 - DNA, 107 bp, Homo sapiens
  misc_feature 15, 19, 21, 29, 64, 65, 80, 90: n = A,T,C or G
agggaggaaaggganaaananatgacaanagcaagacacaagaaatgcagcaataagcacacannactcacacactgacnctaatctggngcaggccatcctcttac

SEQ ID NO: 1398 - DNA, 178 bp, Homo sapiens
  misc_feature 131, 145, 155, 156, 157, 162, 163, 165: n = A,T,C or G
cccttcgagcggccgcccgggcaggtactttcttttttttttttttttttttttatttttttttttttttttttttttttttttttttttttttttttttttttttttttttttttttttttttttggggnaaaaagggtttttnttttcccccnnnttccnncnttttatttttttt

SEQ ID NO: 1399 - DNA, 156 bp, Homo sapiens
  misc_feature 61, 71, 72, 75, 82, 84, 85, 86, 93, 94, 98, 109, 110, 117,133, 134: n = A,T,C or G
ccctttcgagcggccgcccgggcaggtacttttttttttttttttttttttttttttcccnttaaaaaaannacntccaatngnnntcaaccnngggnaaaaaaggggnngggggtnttttaaggggaaaaannaaaaaaaaaaaaagggtttttt

SEQ ID NO: 1400 - DNA, 263 bp, Homo sapiens
ccctttcgagcggccgcccgggcaggtacatgtgcatgtttttacatgggtatatggcatactggcggggactgggcttctagtgtatctattccccagctagtgaacattgaacctataggtaatttttcaacccttgcccccctccccactctcctcgcttttggcattcccagtatctattataaggcttgggttttaatatacctgcttctgcactgagtctgtggaccagggtacctcggccgcgaccacgctaaggg

SEQ ID NO: 1401 - DNA, 187 bp, Homo sapiens
  misc_feature 28, 31, 32, 33, 47, 54, 63, 64, 65, 75, 79, 80, 82, 83, 87,90, 91, 92, 98, 101, 104, 105, 106, 107, 108, 109, 110,113, 114, 115, 118, 119, 120, 121, 125, 126, 127, 128, 132,135, 138, 142, 145, 146, 147, 151, 154, 156, 164, 165: n = A,T,C or G
  misc_feature 166, 170, 174, 175, 186: n = A,T,C or G
acttttttttttttttttttttttaaanccnnnaaaaaaaaaaaaantttcccnatttttttnnnaggggttttntggnnanngggnaannngggggnttnggnnnnnnnaannnttnnnncccnnnntttnaanttncccnggnnnaaanaangnaacccccnnntttnaaannaaaaaaaaaang

SEQ ID NO: 1402 - DNA, 104 bp, Homo sapiens
  misc_feature 48, 52, 53, 57, 63, 66, 72, 73, 74, 76, 77, 78, 87, 89: n = A,T,C or G
cccttagcgtggtcgcggccgaggtacttttttttttttttttttttngccnnaaangggggnaangggggnnntnnngggaaaaancngcccctttttaaaaa

SEQ ID NO: 1403 - DNA, 180 bp, Homo sapiens
  misc_feature 56, 57, 58, 61, 62, 65, 66, 67, 70, 71, 76, 79, 80, 81, 89,91, 92, 95, 102, 103, 104, 105, 106, 118, 123, 124, 128,132, 138, 140, 141, 144, 145, 147, 149, 159, 160, 167, 168,169: n = A,T,C or G
ccctttcgagcggccgcccgggcaggtacttttttttttttttttttttttttgannnccnnccnnnaannaaaanaannnttttgggncnnaanttttttnnnnnttaaaaaaaaanaaacnnaaantttnaaaaanannccnntntntttttttttnnggggggnnnaaaaaaaaaaa

SEQ ID NO: 1404 - DNA, 85 bp, Homo sapiens
  misc_feature 17, 26, 29, 32, 40, 41, 60: n = A,T,C or G
acccttgcctttgaatnatttatatnctnatntttcttgnncccagactttgtccttcantgcactgagtcaaagctttacacta

SEQ ID NO: 1405 - DNA, 108 bp, Homo sapiens
ccctttcgagcggccgcccgggcaggtacttttttttttttttttttttttttttggttttttttttttttttttttttttttttttttttttttttttttttttttt

SEQ ID NO: 1406 - DNA, 46 bp, Homo sapiens
ccctttcgagcggccgcccgggcaggcacttttttttttttttttt

SEQ ID NO: 1407 - DNA, 48 bp, Homo sapiens
ccctttcgagcggccgcccgggcaggtacttttttttttttttttttt

SEQ ID NO: 1408 - DNA, 47 bp, Homo sapiens
ccctttcgagcggccgcccgggcaggtactttttttttttttttttt

SEQ ID NO: 1409 - DNA, 48 bp, Homo sapiens
ccctttcgagcggccgcccgggcaggtacttagttttttttttttttt

SEQ ID NO: 1410 - DNA, 58 bp, Homo sapiens
ccctttcgagcggccgcccgggcaggtacttatatttttctttttttttttttttttg

SEQ ID NO: 1411 - DNA, 57 bp, Homo sapiens
ccctttcgagcggccgcccgggcaggtactttttttttttttttttttttttttttt

SEQ ID NO: 1412 - DNA, 51 bp, Homo sapiens
ccctttcgagcggccgcccgggcaggtactttttttttttttttttttttt

SEQ ID NO: 1413 - DNA, 42 bp, Homo sapiens
cccttagcgtggtcgcggccgaggtacttttttttttttttt

SEQ ID NO: 1414 - DNA, 49 bp, Homo sapiens
cccttagcgtggtcgcggccgaggtacctttttttgttttccttttttt

SEQ ID NO: 1415 - DNA, 46 bp, Homo sapiens
cccttagcgtggtcgcggccgaggtacttttttttttttttttttt

SEQ ID NO: 1416 - DNA, 43 bp, Homo sapiens
  misc_feature 8: n = A,T,C or G
ccctttcnagcggccgcccgggcaggtactttttttttttttt

SEQ ID NO: 1417 - DNA, 212 bp, Homo sapiens
  misc_feature 47, 51, 63, 64, 65, 71, 76, 77, 79, 80, 81, 83, 84, 85, 87,88, 89, 90, 97, 99, 100, 107, 108, 110, 112, 113, 127, 142,143, 144, 145, 148, 151, 165, 166, 169, 178, 185, 186, 187,188, 193, 197, 198, 199: n = A,T,C or G
cccttagcgtggtcgcggccgaggtactttttttttttttttttttngggnaaaaaaaatttnnntttttnccccnngnnngnnngnnnnggggccntnnaaatttnntngnncccccccccccccntttaaaaaaattttnnnnccntanccccccaaattatnnggnttaaaaggntttgccnnnntcccngggnnntttttttttttta
